(19) United States
(12) Patent Application Publication
(10) Pub. No.: US 2006/0234344 A1
(43) Pub. Date: Oct. 19, 2006

(54) Protein kinases

(75) Inventors: Gregory D. Plowman, San Carlos, CA (US); Ricardo Martinez, Foster City, CA (US); David Whyte, Belmont, CA (US); Sucha Sudarsanam, Greenbrae, CA (US); Gerard Manning, La Jolla, CA (US)

Correspondence Address: FOLEY AND LARDNER LLP;SUITE 500, 3000 K STREET NW, WASHINGTON, DC, 20007, US

(73) Assignee: SUGEN, INC.

(21) Appl. No.: 11/377,316

(22) Filed: Mar. 17, 2006

Related U.S. Application Data
(62) Division of application No. 09/979,167, filed on Jul. 26, 2002.
(60) Provisional application No. 60/136,503, filed on May 28, 1999.

(51) Int. Cl. C07H 21/04; C12P 21/06; C12N 9/12

(52) U.S. Cl. 435/69.1; 435/194; 435/320.1; 435/325; 536/23.2

(57) ABSTRACT

The present invention relates to novel kinase polypetides, nucleotide sequences encoding the novel kinase polypetides, as well as various products and methods useful for the diagnosis and treatment of various kinase-related disease and conditions.

### FIELD OF THE INVENTION

[0001] The present invention relates to novel kinase polypeptides, nucleotide sequences encoding the novel kinase polypeptides, as well as various products and methods useful for the diagnosis and treatment of various kinase-related diseases and conditions.

### BACKGROUND OF THE INVENTION

[0002] The following description of the background of the invention is provided to aid in understanding the invention, but is not admitted to be or to describe prior art to the invention.

[0003] Cellular signal transduction is a fundamental mechanism whereby external stimuli that regulate diverse cellular processes are relayed to the interior of cells. One of the key biochemical mechanisms of signal transduction involves the reversible phosphorylation of proteins, which enables regulation of the activity of mature proteins by altering their structure and function.

[0004] Protein phosphorylation plays a pivotal role in biological signal transduction. Among the biological functions controlled by protein phosphorylation are the following: cell division; differentiation and death (apoptosis); cell motility and cytoskeletal structure; control of DNA replication, transcription, splicing and translation; protein translocation events from the endoplasmic reticulum and Golgi apparatus to the membrane and extracellular space; protein nuclear import and export; regulation of metabolic reactions, etc. Abnormal protein phosphorylation is widely recognized to be causally linked to the etiology of many diseases including cancer as well as immunologic, neuronal and metabolic disorders.

[0005] The most common phospho-acceptor amino acid residues are serine, threonine and tyrosine. Phosphorylation in histidine has also been observed in bacteria. The presence of a phosphate moeity modulates protein function in multiple ways. A common mechanism includes changes in the catalytic properties (Vₘₐₓ and Kₘ) of an enzyme leading to its activation or inactivation. A second widely recognized mechanism involves promoting protein-protein interactions. An example of this is the tyrosine autophosphorylation of the ligand-activated EGF receptor tyrosine kinase. This event triggers the high-affinity binding to the phosphotyrosine residue on the receptor's C-terminal intracellular domain to the SH2 motif of the adaptor molecule Grb2. Grb2 in turn binds through its SH3 motif to a second adaptor molecule, such as SHC. The formation of this ternary complex acivates the signaling events that are responsible for the biological effects of EGF. Serine and threonine phosphorylation events have also being recently recognized to exert their biological function through protein-protein interaction events mediated by the high-affinity binding of phosphoserine and phosphothreonine to WW motifs present in a large variety of proteins (Lu, P. J. et al. (1999) Science 283:1325-1328). A third important outcome of protein phosphorylation is changes in the subcellular localization of the substrate. As an example, nuclear import and export events in a large diversity of proteins are regulated by protein phosphorylation (Drier E. A. et al. (1999) Genes Dev 13: 556-568).

[0006] Protein kinases are one of the largest families of eukaryotic proteins with several hundred known members. These proteins share a 250-300 amino acid domain that can be subdivided into 12 distinct subdomains that comprise the common catalytic core structure. These conserved protein motifs have recently been exploited using PCR-based and bioinformatic strategies leading to a significant expansion of the known kinases. Multiple alignment of the sequences in the catalytic domain of protein kinases and subsequent parsimony analysis permits their segregation into a dendrogram reflecting the relatedness of their catalytic domains (FIG. 1). In this manner, related kinases are clustered into distinct branches or subfamilies including: tyrosine kinases, cyclic-nucleotide-dependent kinases, calcium/calmodulin kinases, cyclin-dependent kinases and MAP-kinases, serine-threonine kinase receptors, and several other less defined subfamilies.

[0007] We have recently completed a systematic analysis of the protein kinases present in C. elegans, the multicellular organism whose entire DNA sequence has been determined. We identified 473 unique kinase profiles including 398 full-length conventional kinases, and 20 additional proteins that may function as atypical protein kinases. (Plowman G. D. et al. (1999), Proc. Natl. Acad. Sci. 96:13603-13610).

[0008] Using parsimony analysis, the protein kinases may be divided into 4 major groups: AGC, CAMK, CMGC and tyrosine kinases. In addition, there are a number of minor yet distinct families, including the STE and casein kinase 1, families related to worm- or fungal-specific kinases, and a family designated “other” to represent several smaller families. In addition, we designate an “atypical” family to represent protein kinases whose catalytic domain has little or no primary sequence homology to conventional kinases, including the A6 kinases and PI3 kinases.

[0009] The AGC kinases are basic amino acid-directed enzymes that phosphorylate residues found proximal to Arg and Lys. Examples of this group are the cyclic nucleotide-dependent kinases, G protein kinases, NDR or DBF2 and the ribosomal S6 kinases.

[0010] The CAMK group kinases are also basic amino acid-directed kinases. They include the Ca2+/calmodulin-regulated and AMP-dependent protein kinases, myosin light chain kinases, checkpoint 2 kinases (CHK2) and EMK-related protein kinases. The EMK family of STK are involved in the control of cell polarity, micotubule stability and cancer. One member of the EMK family, C-TAK1 has been reported to control entry into mitosis by activating Cdc25C which in turn dephosphorylates Cdc2.

[0011] CMGC group kinases are “proline-directed” enzymes phosphorylating residues that exist in a proline-rich context. They include the cyclin-dependent kinases (CDKs), mitogen-activated kinases (MAPKs), GSK3s and CLKs. Most CMGC kinases have larger-than-average kinase domains owing to the presence of insertions within subdomains X and XI.

[0012] The tyrosine kinase group encompass both cytoplasmic (i.e. src) as well as transmembrane receptor tyrosine kinases (i.e. EGF receptor). These kinases play a pivotal role in the signal transduction processes that mediate cell proliferation, differentiation and apoptotis.

[0013] Group members that define smaller, yet distinct phylogenetic branches of conventional kinases include the elongation factor 2 kinases (EIFKs); homologues of the yeast sterile family kinases (STE) which refers to 3 classes of kinases which lie sequentially upstream of the MAPKs; mixed lineage kinases (MLKs); Lim-domain containing kinases (LIMKs); Calcium-calmodulin kinase kinases (CAMKK), dual-specific tyrosine kinases (DYRK), integrin receptor associated kinase (IRAK); testis-specific kinases (TSK); UNC-51 related kinases (UNC); several families that are close homologues to worm (C26C2.1, YQ09, ZC581.9, YFL033c, C24A 1.3), Drosophila (SLOB), or yeast (YDOD_sp, YGR262_sc) kinases, and others that are “unique” and don't cluster into any obvious family.

### SUMMARY OF THE INVENTION

[0014] Through a search of the EST database for homologies to the conserved catalytic kinase domain of protein kinases, hundreds of mammalian members of known and previously unidentified protein kinase families and groups have been identified as part of the present invention. Multiple alignment and parsimony analysis of the catalytic domain reveals that approximately half of these protein kinases cluster into 10 known groups, with the other half perhaps defining novel groups. Classification in this manner has proven highly accurate not only in predicting motifs present in the remaining non-catalytic portion of each protein, but also in their regulation, substrates, and signaling pathways. The present invention includes the partial or complete sequence of new protein kinases, their classification, predicted or deduced protein structure, and a strategy for elucidating their biologic and therapeutic relevance.

[0015] Thus, a first aspect of the invention features an isolated, enriched, or purified nucleic acid molecule encoding a kinase polypeptide selected from the group consisting SEQ ID NO:122, SEQ ID NO:123, SEQ ID NO:124, SEQ ID NO:125, SEQ ID NO:126, SEQ ID NO:127, SEQ ID NO:128, SEQ ID NO:129, SEQ ID NO:130, SEQ ID NO:131, SEQ ID NO:132, SEQ ID NO:133, SEQ ID NO:134, SEQ ID NO:135, SEQ ID NO:136, SEQ ID NO:137, SEQ ID NO:138, SEQ ID NO:139, SEQ ID NO:140, SEQ ID NO:141, SEQ ID NO:142, SEQ ID NO:143, SEQ ID NO:144, SEQ ID NO:145, SEQ ID NO:146, SEQ ID NO:147, SEQ ID NO:148, SEQ ID NO:149, SEQ ID NO:150, SEQ ID NO:151, SEQ ID NO:152, SEQ ID NO:153, SEQ ID NO:154, SEQ ID NO:155, SEQ ID NO:156, SEQ ID NO:157, SEQ ID NO:158, SEQ ID NO:159, SEQ ID NO:160, SEQ ID NO:161, SEQ ID NO:162, SEQ ID NO:163, SEQ ID NO:164, SEQ ID NO:165. SEQ ID NO:166, SEQ ID NO:167, SEQ ID NO:168, SEQ ID NO:169, SEQ ID NO:170, SEQ ID NO:171, SEQ ID NO:172, SEQ ID NO:173, SEQ ID NO:174, SEQ ID NO:175, SEQ ID NO:176, SEQ ID NO:177, SEQ ID NO:178, SEQ ID NO:179, SEQ ID NO:180, SEQ ID NO:181, SEQ ID NO:182, SEQ ID NO:183, SEQ ID NO:184, SEQ ID NO:185, SEQ ID NO:186, SEQ ID NO:187, SEQ ID NO:188, SEQ ID NO:189, SEQ ID NO:190, SEQ ID NO:191, SEQ ID NO:199, SEQ ID NO:193, SEQ ID NO:194, SEQ ID NO:195, SEQ ID NO:196, SEQ ID NO:197, SEQ ID NO:198, SEQ ID NO:199, SEQ ID NO:200, SEQ ID NO:201, SEQ ID NO:202, SEQ ID NO:203, SEQ ID NO:204, SEQ ID NO:205, SEQ ID NO:206, SEQ ID NO:207, SEQ ID NO:208, SEQ ID NO:209, SEQ ID NO:210, SEQ ID NO:211, SEQ ID NO:212, SEQ ID NO:213, SEQ ID NO:214, SEQ ID NO:215, SEQ ID NO:216, SEQ ID NO:217, SEQ ID NO:218, SEQ ID NO:219, SEQ ID NO:220, SEQ ID NO:221, SEQ ID NO:222, SEQ ID NO:223, SEQ ID NO:224, SEQ ID NO:225, SEQ ID NO:226, SEQ ID NO:227, SEQ ID NO:228, SEQ ID NO:229, SEQ ID NO:230, SEQ ID NO:231, SEQ ID NO:232, SEQ ID NO:233, SEQ ID NO:234, SEQ ID NO:235, SEQ ID NO:236, SEQ ID NO:237, SEQ ID NO:238, SEQ ID NO:239, SEQ ID NO:240, SEQ ID NO:241, and SEQ ID NO:242.

[0016] By “isolated” in reference to nucleic acid is meant a polymer of nucleotides conjugated to each other, including DNA and RNA, that is isolated from a natural source or that is synthesized. The isolated nucleic acid of the present invention is unique in the sense that it is not found in a pure or separated state in nature. Use of the term “isolated” indicates that a naturally occurring sequence has been removed from its normal cellular (ie., chromosomal) environment. Thus, the sequence may be in a cell-free solution or placed in a different cellular environment. The term does not imply that the sequence is the only nucleotide chain present, but that it is essentially free (about 90-95% pure at least) of non-nucleotide material naturally associated with it, and thus is distinguished from isolated chromosomes.

[0017] By the use of the term “enriched” in reference to nucleic acid is meant that the specific DNA or RNA sequence constitutes a significantly higher fraction (2-5 fold) of the total DNA or RNA present in the cells or solution of interest than in normal or diseased cells or in the cells from which the sequence was taken. This could be caused by a person by preferential reduction in the amount of other DNA or RNA present, or by a preferential increase in the amount of the specific DNA or RNA sequence, or by a combination of the two. However, it should be noted that enriched does not imply that there are no other DNA or RNA sequences present, just that the relative amount of the sequence of interest has been significantly increased. The term “significant” is used to indicate that the level of increase is useful to the person making such an increase, and generally means an increase relative to other nucleic acids of about at least 2 fold, more preferably at least 5 to 10 fold or even more. The term also does not imply that there is no DNA or RNA from other sources. The other source DNA may, for example, comprise DNA from a yeast or bacterial genome, or a cloning vector such as pUC19. This term distinguishes from naturally occurring events, such as viral infection, or tumor type growths, in which the level of one mRNA may be naturally increased relative to other species of mRNA. That is, the term is meant to cover only those situations in which a person has intervened to elevate the proportion of the desired nucleic acid.

[0018] It is also advantageous for some purposes that a nucleotide sequence be in purified form The term “purified” in reference to nucleic acid does not require absolute purity (such as a homogeneous preparation). Instead, it represents an indication that the sequence is relatively more pure than in the natural environment (compared to the natural level this level should be at least 2-5 fold greater, e.g., in terms of mg/mL). Individual clones isolated from a cDNA library may be purified to electrophoretic homogeneity. The claimed DNA molecules obtained from these clones could be obtained directly from total DNA or from total RNA. The cDNA clones are not naturally occurring, but rather are preferably obtained via manipulation of a partially purified naturally occurring substance (messenger RNA). The construction of a cDNA library from mRNA involves the creation of a synthetic substance (cDNA) and pure individual cDNA clones can be isolated from the synthetic library by clonal selection of the cells carrying the cDNA library. Thus, the process which includes the construction of a cDNA library from mRNA and isolation of distinct cDNA clones yields an approximately 10⁶-fold purification of the native message. Thus, purification of at least one order of magnitude, preferably two or three orders, and more preferably four or five orders of magnitude is expressly contemplated.

[0019] By a “kinase polypeptide” is meant 10 (preferably 20, more preferably 40, most preferably 75) or more contiguous amino acids set forth in an amino acid sequence selected from the group consisting of those set forth in SEQ ID NO:122,SEQ ID NO:123, SEQ ID NO:124, SEQ ID NO:125, SEQ ID NO:126, SEQ ID NO:127, SEQ ID NO:128, SEQ ID NO:129, SEQ ID NO:130, SEQ ID NO:131, SEQ ID NO:132, SEQ ID NO:133, SEQ ID NO:134, SEQ ID NO:135, SEQ ID NO:136, SEQ ID NO:137, SEQ ID NO:138, SEQ ID NO:139, SEQ ID NO:140, SEQ ID NO:141, SEQ ID NO:142, SEQ ID NO:143, SEQ ID NO:144, SEQ ID NO:145, SEQ ID NO:146, SEQ ID NO:147, SEQ ID NO:148, SEQ ID NO:149, SEQ ID NO:150, SEQ ID NO:151, SEQ ID NO:152, SEQ ID NO:153, SEQ ID NO:154, SEQ ID NO:155, SEQ ID NO:156, SEQ ID NO:157, SEQ ID NO:158, SEQ ID NO:159, SEQ ID NO:160, SEQ ID NO:161, SEQ ID NO:162, SEQ ID NO:163, SEQ ID NO:164, SEQ ID NO:165. SEQ ID NO:166, SEQ ID NO:167, SEQ ID NO:168, SEQ ID NO:169, SEQ ID NO:170, SEQ ID NO:171, SEQ ID NO:172, SEQ ID NO:173, SEQ ID NO:174, SEQ ID NO:175, SEQ ID NO:176, SEQ ID NO:177, SEQ ID NO:178, SEQ ID NO:179, SEQ ID NO:180, SEQ ID NO:181, SEQ ID NO:182, SEQ ID NO:183, SEQ ID NO:184, SEQ ID NO:185, SEQ ID NO:186, SEQ ID NO:187, SEQ ID NO:188, SEQ ID NO:189, SEQ ID NO:190, SEQ ID NO:191, SEQ ID NO:199, SEQ ID NO:193, SEQ ID NO:194, SEQ ID NO:195, SEQ ID NO:196, SEQ ID NO:197, SEQ ID NO:198, SEQ ID NO:199, SEQ ID NO:200, SEQ ID NO:201, SEQ ID NO:202, SEQ ID NO:203, SEQ ID NO:204, SEQ ID NO:205, SEQ ID NO:206, SEQ ID NO:207, SEQ ID NO:208, SEQ ID NO:209, SEQ ID NO:210, SEQ ID NO:211, SEQ ID NO:212, SEQ ID NO:213, SEQ ID NO:214, SEQ ID NO:215, SEQ ID NO:216, SEQ ID NO:217, SEQ ID NO:218, SEQ ID NO:219, SEQ ID NO:220, SEQ ID NO:221, SEQ ID NO:222, SEQ ID NO:223, SEQ ID NO:224, SEQ ID NO:225, SEQ ID NO:226, SEQ ID NO:227, SEQ ID NO:228, SEQ ID NO:229, SEQ ID NO:230, SEQ ID NO:231, SEQ ID NO:232, SEQ ID NO:233, SEQ ID NO:234, SEQ ID NO:235, SEQ ID NO:236, SEQ ID NO:237, SEQ ID NO:238, SEQ ID NO:239, SEQ ID NO:240, SEQ ID NO:241, and SEQ ID NO:242, or functional derivatives thereof as described herein. For sequences for which the full-length sequence is not given, the remaining sequences can be determined using methods well-known to those in the art and are intended to be included in the invention. In certain aspects, polypeptides of 100, 200, 300 or more amino acids are preferred. The kinase polypeptide can be encoded by a full-length nucleic acid sequence or any portion of the full-length nucleic acid sequence, so long as a functional activity of the polypeptide is retained. By “functional” domain is meant any region of the polypeptide that may play a regulatory or catalytic role as predicted from amino acid sequence homology to other proteins or by the presence of amino acid sequences that may give rise to specific structural conformations (i.e., coiled-coils). For some purposes, polypeptide domains are preferred, including, but not limited to, N-terminal, catalytic/kinase and C-terminal.

[0020] The amino acid sequence will be substantially similar to a sequence selected from the group consisting of those set forth in SEQ ID NO:122, SEQ ID NO:123, SEQ ID NO:124, SEQ ID NO:125, SEQ ID NO:126, SEQ ID NO:127, SEQ ID NO:128, SEQ ID NO:129, SEQ ID NO:130, SEQ ID NO:131, SEQ ID NO:132, SEQ ID NO:133, SEQ ID NO:134, SEQ ID NO:135, SEQ ID NO:136, SEQ ID NO:137, SEQ ID NO:138, SEQ ID NO:139, SEQ ID NO:140, SEQ ID NO:141, SEQ ID NO:142, SEQ ID NO:143, SEQ ID NO:144, SEQ ID NO:145, SEQ ID NO:146, SEQ ID NO:147, SEQ ID NO:148, SEQ ID NO:149, SEQ ID NO:150, SEQ ID NO:151, SEQ ID NO:152, SEQ ID NO:153, SEQ ID NO:154, SEQ ID NO:155, SEQ ID NO:156, SEQ ID NO:157, SEQ ID NO:158, SEQ ID NO:159, SEQ ID NO:160, SEQ ID NO:161, SEQ ID NO:162, SEQ ID NO:163, SEQ ID NO:164, SEQ ID NO:165. SEQ ID NO:166, SEQ ID NO:167, SEQ ID NO:168, SEQ ID NO:169, SEQ ID NO:170, SEQ ID NO:171, SEQ ID NO:172, SEQ ID NO:173, SEQ ID NO:174, SEQ ID NO:175, SEQ ID NO:176, SEQ ID NO:177, SEQ ID NO:178, SEQ ID NO:179, SEQ ID NO:180, SEQ ID NO:181, SEQ ID NO:182, SEQ ID NO:183, SEQ ID NO:184, SEQ ID NO:185, SEQ ID NO:186, SEQ ID NO:187, SEQ ID NO:188, SEQ ID NO:189, SEQ ID NO:190, SEQ ID NO:191, SEQ ID NO:199, SEQ ID NO:193, SEQ ID NO:194, SEQ ID NO:195, SEQ ID NO:196, SEQ ID NO:197, SEQ ID NO:198, SEQ ID NO:199, SEQ ID NO:200, SEQ ID NO:201, SEQ ID NO:202, SEQ ID NO:203, SEQ ID NO:204, SEQ ID NO:205, SEQ ID NO:206, SEQ ID NO:207, SEQ ID NO:208, SEQ ID NO:209, SEQ ID NO:210, SEQ ID NO:211, SEQ ID NO:212, SEQ ID NO:213, SEQ ID NO:214, SEQ ID NO:215, SEQ ID NO:216, SEQ ID NO:217, SEQ ID NO:218, SEQ ID NO:219, SEQ ID NO:220, SEQ ID NO:221, SEQ ID NO:222, SEQ ID NO:223, SEQ ID NO:224, SEQ ID NO:225, SEQ ID NO:226, SEQ ID NO:227, SEQ ID NO:228, SEQ ID NO:229, SEQ ID NO:230, SEQ ID NO:231, SEQ ID NO:232, SEQ ID NO:233, SEQ ID NO:234, SEQ ID NO:235, SEQ ID NO:236, SEQ ID NO:237, SEQ ID NO:238, SEQ ID NO:239, SEQ ID NO:240, SEQ ID NO:241, and SEQ ID NO:242, or the corresponding full-length amino acid sequence, or fragments thereof A sequence that is substantially similar to a sequence selected from the group consisting of those set forth in SEQ ID NO:122, SEQ ID NO:123, SEQ ID NO:124, SEQ ID NO:125, SEQ ID NO:126, SEQ ID NO:127, SEQ ID NO:128, SEQ ID NO:129, SEQ ID NO:130, SEQ ID NO:131, SEQ ID NO:132, SEQ ID NO:133, SEQ ID NO:134, SEQ ID NO:135, SEQ ID NO:136, SEQ ID NO:137, SEQ ID NO:138, SEQ ID NO:139, SEQ ID NO:140, SEQ ID NO:141, SEQ ID NO:142, SEQ ID NO:143, SEQ ID NO:144, SEQ ID NO:145, SEQ ID NO:146, SEQ ID NO:147, SEQ ID NO:148, SEQ ID NO:149, SEQ ID NO:150, SEQ ID NO:151, SEQ ID NO:152, SEQ ID NO:153, SEQ ID NO:154, SEQ ID NO:155, SEQ ID NO:156, SEQ ID NO:157, SEQ ID NO:158, SEQ ID NO:159, SEQ ID NO:160, SEQ ID NO:161, SEQ ID NO:162, SEQ ID NO:163, SEQ ID NO:164, SEQ ID NO:165. SEQ ID NO:166, SEQ ID NO:167, SEQ ID NO:168, SEQ ID NO:169, SEQ ID NO:170, SEQ ID NO:171, SEQ ID NO:172, SEQ ID NO:173, SEQ ID NO:174, SEQ ID NO:175, SEQ ID NO:176, SEQ ID NO:177, SEQ ID NO:178, SEQ ID NO:179, SEQ ID NO:180, SEQ ID NO:181, SEQ ID NO:182, SEQ ID NO:183, SEQ ID NO:184, SEQ ID NO:185, SEQ ID NO:186, SEQ ID NO:187, SEQ ID NO:188, SEQ ID NO:189, SEQ ID NO:190, SEQ ID NO:191, SEQ ID NO:199, SEQ ID NO:193, SEQ ID NO:194, SEQ ID NO:195, SEQ ID NO:196, SEQ ID NO:197, SEQ ID NO:198, SEQ ID NO:199, SEQ ID NO:200, SEQ ID NO:201, SEQ ID NO:202, SEQ ID NO:203, SEQ ID NO:204, SEQ ID NO:205, SEQ ID NO:206, SEQ ID NO:207, SEQ ID NO:208, SEQ ID NO:209, SEQ ID NO:210, SEQ ID NO:211, SEQ ID NO:212, SEQ ID NO:213, SEQ ID NO:214, SEQ ID NO:215, SEQ ID NO:216, SEQ ID NO:217, SEQ ID NO:218, SEQ ID NO:219, SEQ ID NO:220, SEQ ID NO:221, SEQ ID NO:222, SEQ ID NO:223, SEQ ID NO:224, SEQ ID NO:225, SEQ ID NO:226, SEQ ID NO:227, SEQ ID NO:228, SEQ ID NO:229, SEQ ID NO:230, SEQ ID NO:231, SEQ ID NO:232, SEQ ID NO:233, SEQ ID NO:234, SEQ ID NO:235, SEQ ID NO:236, SEQ ID NO:237, SEQ ID NO:238, SEQ ID NO:239, SEQ ID NO:240, SEQ ID NO:241, and SEQ ID NO:242 will have at least 75% identity (preferably 90%, more preferably at least 95% and most preferably 99-100%) to a sequence selected from the group consisting of those set forth in SEQ ID NO:122, SEQ ID NO:123, SEQ ID NO:124, SEQ ID NO: 125, SEQ ID NO:126, SEQ ID NO:127, SEQ ID NO:128, SEQ ID NO:129, SEQ ID NO:130, SEQ ID NO:131, SEQ ID NO:132, SEQ ID NO:133, SEQ ID NO:134, SEQ ID NO:135, SEQ ID NO:136, SEQ ID NO:137, SEQ ID NO:138, SEQ ID NO:139, SEQ ID NO:140, SEQ ID NO:141, SEQ ID NO:142, SEQ ID NO:143, SEQ ID NO:144, SEQ ID NO:145, SEQ ID NO:146, SEQ ID NO:147, SEQ ID NO:148, SEQ ID NO:149, SEQ ID NO:150, SEQ ID NO:151, SEQ ID NO:152, SEQ ID NO:153, SEQ ID NO:154, SEQ ID NO:155, SEQ ID NO:156, SEQ ID NO:157, SEQ ID NO:158, SEQ ID NO:159, SEQ ID NO:160, SEQ ID NO:161, SEQ ID NO:162, SEQ ID NO:163, SEQ ID NO:164, SEQ ID NO:165. SEQ ID NO:166, SEQ ID NO:167, SEQ ID NO:168, SEQ ID NO:169, SEQ ID NO:170, SEQ ID NO:171, SEQ ID NO:172, SEQ ID NO:173, SEQ ID NO:174, SEQ ID NO:175, SEQ ID NO:176, SEQ ID NO:177, SEQ ID NO:178, SEQ ID NO:179, SEQ ID NO:180, SEQ ID NO:181, SEQ ID NO:182, SEQ ID NO:183, SEQ ID NO:184, SEQ ID NO:185, SEQ ID NO:186, SEQ ID NO:187, SEQ ID NO:188, SEQ ID NO:189, SEQ ID NO:190, SEQ ID NO:191, SEQ ID NO:199, SEQ ID NO:193, SEQ ID NO:194, SEQ ID NO:195, SEQ ID NO:196, SEQ ID NO:197, SEQ ID NO:198, SEQ ID NO:199, SEQ ID NO:200, SEQ ID NO:201, SEQ ID NO:202, SEQ ID NO:203, SEQ ID NO:204, SEQ ID NO:205, SEQ ID NO:206, SEQ ID NO:207, SEQ ID NO:208, SEQ ID NO:209, SEQ ID NO:210, SEQ ID NO:211, SEQ ID NO:212, SEQ ID NO:213, SEQ ID NO:214, SEQ ID NO:215, SEQ ID NO:216, SEQ ID NO:217, SEQ ID NO:218, SEQ ID NO:219, SEQ ID NO:220, SEQ ID NO:221, SEQ ID NO:222, SEQ ID NO:223, SEQ ID NO:224, SEQ ID NO:225, SEQ ID NO:226, SEQ ID NO:227, SEQ ID NO:228, SEQ ID NO:229, SEQ ID NO:230, SEQ ID NO:231, SEQ ID NO:232, SEQ ID NO:233, SEQ ID NO:234, SEQ ID NO:235, SEQ ID NO:236, SEQ ID NO:237, SEQ ID NO:238, SEQ ID NO:239, SEQ ID NO:240, SEQ ID NO:241, and SEQ ID NO:242 or portions of or the entire corresponding full-length amino acid sequences.

[0021] By “identity” is meant a property of sequences that measures their similarity or relationship. Identity is measured by dividing the number of identical residues between two sequences (either full-length or a defined domain) by the total number of residues in the known sequence, or the domain of the known sequence, and multiplying the product by 100. Thus, two copies of exactly the same sequence have 100% identity, but sequences that are less highly conserved, and have replacements and substitutions, have a lower degree of identity. “Gaps” are spaces in an alignment that can result from aligning a novel sequence with a known sequence when the novel sequence has additions or deletions of amino acids in comparison with the known sequence. These gaps do not factor into the assessment of % identity using the sbove calculation.

[0022] Those skilled in the art will recognize that several computer programs are also available for determining sequence identity using standard parameters, for example, Blast (Altschul, et al. (1997) Nucleic Acids Res. 25:3389-3402), Blast2 (Altschul, et al. (1990) J. Mol. Biol. 215:403-410), and Smith-Waterman (Smith, et al. (1981) J. Mol. Biol. 147:195-197).

[0023] In preferred embodiments, the invention features isolated, enriched, or purified nucleic acid molecules encoding a kinase polypeptide comprising a nucleotide sequence that: (a) encodes a polypeptide having an amino acid sequence selected from the group consisting of those set forth in SEQ ID NO:122, SEQ ID NO:123, SEQ ID NO:124, SEQ ID NO:125, SEQ ID NO:126, SEQ ID NO:127, SEQ ID NO:128, SEQ ID NO:129, SEQ ID NO:130, SEQ ID NO:131, SEQ ID NO:132, SEQ ID NO:133, SEQ ID NO:134, SEQ ID NO:135, SEQ ID NO:136, SEQ ID NO:137, SEQ ID NO:138, SEQ ID NO:139, SEQ ID NO:140, SEQ ID NO:141, SEQ ID NO:142, SEQ ID NO:143, SEQ ID NO:144, SEQ ID NO:145, SEQ ID NO:146, SEQ ID NO:147, SEQ ID NO:148, SEQ ID NO:149, SEQ ID NO:150, SEQ ID NO:151, SEQ ID NO:152, SEQ ID NO:153, SEQ ID NO:154, SEQ ID NO:155, SEQ ID NO:156, SEQ ID NO:157, SEQ ID NO:158, SEQ ID NO:159, SEQ ID NO:160, SEQ ID NO:161, SEQ ID NO:162, SEQ ID NO:163, SEQ ID NO:164, SEQ ID NO:165. SEQ ID NO:166, SEQ ID NO:167, SEQ ID NO:168, SEQ ID NO:169, SEQ ID NO:170, SEQ ID NO:171, SEQ ID NO:172, SEQ ID NO:173, SEQ ID NO:174, SEQ ID NO:175, SEQ ID NO:176, SEQ ID NO:177, SEQ ID NO:178, SEQ ID NO:179, SEQ ID NO:180, SEQ ID NO:181, SEQ ID NO:182, SEQ ID NO:183, SEQ ID NO:184, SEQ ID NO:185, SEQ ID NO:186, SEQ ID NO:187, SEQ ID NO:188, SEQ ID NO:189, SEQ ID NO:190, SEQ ID NO:191, SEQ ID NO:199, SEQ ID NO:193, SEQ ID NO:194, SEQ ID NO:195, SEQ ID NO:196, SEQ ID NO:197, SEQ ID NO:198, SEQ ID NO:199, SEQ ID NO:200, SEQ ID NO:201, SEQ ID NO:202, SEQ ID NO:203, SEQ ID NO:204, SEQ ID NO:205, SEQ ID NO:206, SEQ ID NO:207, SEQ ID NO:208, SEQ ID NO:209, SEQ ID NO:210, SEQ ID NO:211, SEQ ID NO:212, SEQ ID NO:213, SEQ ID NO:214, SEQ ID NO:215, SEQ ID NO:216, SEQ ID NO:217, SEQ ID NO:218, SEQ ID NO:219, SEQ ID NO:220, SEQ ID NO:221, SEQ ID NO:222, SEQ ID NO:223, SEQ ID NO:224, SEQ ID NO:225, SEQ ID NO:226, SEQ ID NO:227, SEQ ID NO:228, SEQ ID NO:229, SEQ ID NO:230, SEQ ID NO:231, SEQ ID NO:232, SEQ ID NO:233, SEQ ID NO:234, SEQ ID NO:235, SEQ ID NO:236, SEQ ID NO:237, SEQ ID NO:238, SEQ ID NO:239, SEQ ID NO:240, SEQ ID NO:241, and SEQ ID NO:242, or the corresponding full-length amino acid sequence, or fragments thereof A sequence that is substantially similar to a sequence selected from the group consisting of those set forth in SEQ ID NO:122, SEQ ID NO:123, SEQ ID NO:124, SEQ ID NO:125, SEQ ID NO:126, SEQ ID NO:127, SEQ ID NO:128, SEQ ID NO:129, SEQ ID NO:130, SEQ ID NO:131, SEQ ID NO:132, SEQ ID NO:133, SEQ ID NO:134, SEQ ID NO:135, SEQ ID NO:136, SEQ ID NO:137, SEQ ID NO:138, SEQ ID NO:139, SEQ ID NO:140, SEQ ID NO:141, SEQ ID NO:142, SEQ ID NO:143, SEQ ID NO:144, SEQ ID NO:145, SEQ ID NO:146, SEQ ID NO:147, SEQ ID NO:148, SEQ ID NO:149, SEQ ID NO:150, SEQ ID NO:151, SEQ ID NO:152, SEQ ID NO:153, SEQ ID NO:154, SEQ ID NO:155, SEQ ID NO:156, SEQ ID NO:157, SEQ ID NO:158, SEQ ID NO:159, SEQ ID NO:160, SEQ ID NO:161, SEQ ID NO:162, SEQ ID NO:163, SEQ ID NO:164, SEQ ID NO:165. SEQ ID NO:166, SEQ ID NO:167, SEQ ID NO:168, SEQ ID NO:169, SEQ ID NO:170, SEQ ID NO:171, SEQ ID NO:172, SEQ ID NO:173, SEQ ID NO:174, SEQ ID NO:175, SEQ ID NO:176, SEQ ID NO:177, SEQ ID NO:178, SEQ ID NO:179, SEQ ID NO:180, SEQ ID NO:181, SEQ ID NO:182, SEQ ID NO:183, SEQ ID NO:184, SEQ ID NO:185, SEQ ID NO:186, SEQ ID NO:187, SEQ ID NO:188, SEQ ID NO:189, SEQ ID NO:190, SEQ ID NO:191, SEQ ID NO:199, SEQ ID NO:193, SEQ ID NO:194, SEQ ID NO:195, SEQ ID NO:196, SEQ ID NO:197, SEQ ID NO:198, SEQ ID NO:199, SEQ ID NO:200, SEQ ID NO:201, SEQ ID NO:202, SEQ ID NO:203, SEQ ID NO:204, SEQ ID NO:205, SEQ ID NO:206, SEQ ID NO:207, SEQ ID NO:208, SEQ ID NO:209, SEQ ID NO:210, SEQ ID NO:211, SEQ ID NO:212, SEQ ID NO:213, SEQ ID NO:214, SEQ ID NO:215, SEQ ID NO:216, SEQ ID NO:217, SEQ ID NO:218, SEQ ID NO:219, SEQ ID NO:220, SEQ ID NO:221, SEQ ID NO:222, SEQ ID NO:223, SEQ ID NO:224, SEQ ID NO:225, SEQ ID NO:226, SEQ ID NO:227, SEQ ID NO:228, SEQ ID NO:229, SEQ ID NO:230, SEQ ID NO:231, SEQ ID NO:232, SEQ ID NO:233, SEQ ID NO:234, SEQ ID NO:235, SEQ ID NO:236, SEQ ID NO:237, SEQ ID NO:238, SEQ ID NO:239, SEQ ID NO:240, SEQ ID NO:241, and SEQ ID NO:242 will have at least 75% identity (preferably 90%, more preferably at least 95% and most preferably 99-100%) to the sequence selected from the group consisting of those set forth in SEQ ID NO:122, SEQ ID NO:123, SEQ ID NO:124, SEQ ID NO:125, SEQ ID NO:126, SEQ ID NO:127, SEQ ID NO:128, SEQ ID NO:129, SEQ ID NO:130, SEQ ID NO:131, SEQ ID NO:132, SEQ ID NO:133, SEQ ID NO:134, SEQ ID NO:135, SEQ ID NO:136, SEQ ID NO:137, SEQ ID NO:138, SEQ ID NO:139, SEQ ID NO:140, SEQ ID NO:141, SEQ ID NO:142, SEQ ID NO:143, SEQ ID NO:144, SEQ ID NO:145, SEQ ID NO:146, SEQ ID NO:147, SEQ ID NO:148, SEQ ID NO:149, SEQ ID NO:150, SEQ ID NO:151, SEQ ID NO:152, SEQ ID NO:153, SEQ ID NO:154, SEQ ID NO:155, SEQ ID NO:156, SEQ ID NO:157, SEQ ID NO:158, SEQ ID NO:159, SEQ ID NO:160, SEQ ID NO:161, SEQ ID NO:162, SEQ ID NO:163, SEQ ID NO:164, SEQ ID NO:165. SEQ ID NO:166, SEQ ID NO:167, SEQ ID NO:168, SEQ ID NO:169, SEQ ID NO:170, SEQ ID NO:171, SEQ ID NO:172, SEQ ID NO:173, SEQ ID NO:174, SEQ ID NO:175, SEQ ID NO:176, SEQ ID NO:177, SEQ ID NO:178, SEQ ID NO:179, SEQ ID NO:180, SEQ ID NO:181, SEQ ID NO:182, SEQ ID NO:183, SEQ ID NO:184, SEQ ID NO:185, SEQ ID NO:186, SEQ ID NO:187, SEQ ID NO:188, SEQ ID NO:189, SEQ ID NO:190, SEQ ID NO:191, SEQ ID NO:199, SEQ ID NO:193, SEQ ID NO:194, SEQ ID NO:195, SEQ ID NO:196, SEQ ID NO:197, SEQ ID NO:198, SEQ ID NO:199, SEQ ID NO:200, SEQ ID NO:201, SEQ ID NO:202, SEQ ID NO:203, SEQ ID NO:204, SEQ ID NO:205, SEQ ID NO:206, SEQ ID NO:207, SEQ ID NO:208, SEQ ID NO:209, SEQ ID NO:210, SEQ ID NO:211, SEQ ID NO:212, SEQ ID NO:213, SEQ ID NO:214, SEQ ID NO:215, SEQ ID NO:216, SEQ ID NO:217, SEQ ID NO:218, SEQ ID NO:219, SEQ ID NO:220, SEQ ID NO:221, SEQ ID NO:222, SEQ ID NO:223, SEQ ID NO:224, SEQ ID NO:225, SEQ ID NO:226, SEQ ID NO:227, SEQ ID NO:228, SEQ ID NO:229, SEQ ID NO:230, SEQ ID NO:231, SEQ ID NO:232, SEQ ID NO:233, SEQ ID NO:234, SEQ ID NO:235, SEQ ID NO:236, SEQ ID NO:237, SEQ ID NO:238, SEQ ID NO:239, SEQ ID NO:240, SEQ ID NO:241, and SEQ ID NO:242; () is the complement of the nucleotide sequence of (a); (c) hybridizes under highly stringent conditions to the nucleotide molecule of (a) and encodes a naturally occurring kinase polypeptide; (d) encodes a kinase polypeptide having an amino acid sequence selected from the group consisting of those set forth in SEQ ID NO:122, SEQ ID NO:123, SEQ ID NO:124, SEQ ID NO:125, SEQ ID NO:126, SEQ ID NO:127, SEQ ID NO:128, SEQ ID NO:129, SEQ ID NO:130, SEQ ID NO:131, SEQ ID NO:132, SEQ ID NO:133, SEQ ID NO:134, SEQ ID NO:135, SEQ ID NO:136, SEQ ID NO:137, SEQ ID NO:138, SEQ ID NO:139, SEQ ID NO:140, SEQ ID NO:141, SEQ ID NO:142, SEQ ID NO:143, SEQ ID NO:144, SEQ ID NO:145, SEQ ID NO:146, SEQ ID NO:147, SEQ ID NO:148, SEQ ID NO:149, SEQ ID NO:150, SEQ ID NO:151, SEQ ID NO:152, SEQ ID NO:153, SEQ ID NO:154, SEQ ID NO:155, SEQ ID NO:156, SEQ ID NO:157, SEQ ID NO:158, SEQ ID NO:159, SEQ ID NO:160, SEQ ID NO:161, SEQ ID NO:162, SEQ ID NO:163, SEQ ID NO:164, SEQ ID NO:165. SEQ ID NO:166, SEQ ID NO:167, SEQ ID NO:168, SEQ ID NO:169, SEQ ID NO:170, SEQ ID NO:171, SEQ ID NO:172, SEQ ID NO:173, SEQ ID NO:174, SEQ ID NO:175, SEQ ID NO:176, SEQ ID NO:177, SEQ ID NO:178, SEQ ID NO:179, SEQ ID NO:180, SEQ ID NO:181, SEQ ID NO:182, SEQ ID NO:183, SEQ ID NO:184, SEQ ID NO:185, SEQ ID NO:186, SEQ ID NO:187, SEQ ID NO:188, SEQ ID NO:189, SEQ ID NO:190, SEQ ID NO:191, SEQ ID NO:199, SEQ ID NO:193, SEQ ID NO:194, SEQ ID NO:195, SEQ ID NO:196, SEQ ID NO:197, SEQ ID NO:198, SEQ ID NO:199, SEQ ID NO:200, SEQ ID NO:201, SEQ ID NO:202, SEQ ID NO:203, SEQ ID NO:204, SEQ ID NO:205, SEQ ID NO:206, SEQ ID NO:207, SEQ ID NO:208, SEQ ID NO:209, SEQ ID NO:210, SEQ ID NO:211, SEQ ID NO:212, SEQ ID NO:213, SEQ ID NO:214, SEQ ID NO:215, SEQ ID NO:216, SEQ ID NO:217, SEQ ID NO:218, SEQ ID NO:219, SEQ ID NO:220, SEQ ID NO:221, SEQ ID NO:222, SEQ ID NO:223, SEQ ID NO:224, SEQ ID NO:225, SEQ ID NO:226, SEQ ID NO:227, SEQ ID NO:228, SEQ ID NO:229, SEQ ID NO:230, SEQ ID NO:231, SEQ ID NO:232, SEQ ID NO:233, SEQ ID NO:234, SEQ ID NO:235, SEQ ID NO:236, SEQ ID NO:237, SEQ ID NO:238, SEQ ID NO:239, SEQ ID NO:240, SEQ ID NO:241, and SEQ ID NO:242, or the corresponding full-length amino acid sequence, or fragments thereof. A sequence that is substantially similar to a sequence selected from the group consisting of those set forth in SEQ ID NO:122, SEQ ID NO:123, SEQ ID NO:124, SEQ ID NO:125, SEQ ID NO:126, SEQ ID NO:127, SEQ ID NO:128, SEQ ID NO:129, SEQ ID NO:130, SEQ ID NO:131, SEQ ID NO:132, SEQ ID NO:133, SEQ ID NO:134, SEQ ID NO:135, SEQ ID NO:136, SEQ ID NO:137, SEQ ID NO:138, SEQ ID NO:139, SEQ ID NO:140, SEQ ID NO:141, SEQ ID NO:142, SEQ ID NO:143, SEQ ID NO:144, SEQ ID NO:145, SEQ ID NO:146, SEQ ID NO:147, SEQ ID NO:148, SEQ ID NO:149, SEQ ID NO:150, SEQ ID NO:151, SEQ ID NO:152, SEQ ID NO:153, SEQ ID NO:154, SEQ ID NO:155, SEQ ID NO:156, SEQ ID NO:157, SEQ ID NO:158, SEQ ID NO:159, SEQ ID NO:160, SEQ ID NO:161, SEQ ID NO:162, SEQ ID NO:163, SEQ ID NO:164, SEQ ID NO:165. SEQ ID NO:166, SEQ ID NO:167, SEQ ID NO:168, SEQ ID NO:169, SEQ ID NO:170, SEQ ID NO:171, SEQ ID NO:172, SEQ ID NO:173, SEQ ID NO:174, SEQ ID NO:175, SEQ ID NO:176, SEQ ID NO:177, SEQ ID NO:178, SEQ ID NO:179, SEQ ID NO:180, SEQ ID NO:181, SEQ ID NO:182, SEQ ID NO:183, SEQ ID NO:184, SEQ ID NO:185, SEQ ID NO:186, SEQ ID NO:187, SEQ ID NO:188, SEQ ID NO:189, SEQ ID NO:190, SEQ ID NO:191, SEQ ID NO:199, SEQ ID NO:193, SEQ ID NO:194, SEQ ID NO:195, SEQ ID NO:196, SEQ ID NO:197, SEQ ID NO:198, SEQ ID NO:199, SEQ ID NO:200, SEQ ID NO:201, SEQ ID NO:202, SEQ ID NO:203, SEQ ID NO:204, SEQ ID NO:205, SEQ ID NO:206, SEQ ID NO:207, SEQ ID NO:208, SEQ ID NO:209, SEQ ID NO:210, SEQ ID NO:211, SEQ ID NO:212, SEQ ID NO:213, SEQ ID NO:214, SEQ ID NO:215, SEQ ID NO:216, SEQ ID NO:217, SEQ ID NO:218, SEQ ID NO:219, SEQ ID NO:220, SEQ ID NO:221, SEQ ID NO:222, SEQ ID NO:223, SEQ D) NO:224, SEQ ID NO:225, SEQ ID NO:226, SEQ ID NO:227, SEQ ID NO:228, SEQ ID NO:229, SEQ ID NO:230, SEQ ID NO:231, SEQ ID NO:232, SEQ ID NO:233, SEQ ID NO:234, SEQ ID NO:235, SEQ ID NO:236, SEQ ID NO:237, SEQ ID NO:238, SEQ ID NO:239, SEQ ID NO:240, SEQ ID NO:241, and SEQ ID NO:242 will have at least 75% identity (preferably 90%, more preferably at least 95% and most preferably 99-100%) to the sequence of SEQ ID NO:122, SEQ ID NO:123, SEQ ID NO:124, SEQ ID NO:125, SEQ ID NO:126, SEQ ID NO:127, SEQ ID NO:128, SEQ ID NO:129, SEQ ID NO:130, SEQ ID NO:131, SEQ ID NO:132, SEQ ID NO:133, SEQ ID NO:134, SEQ ID NO:135, SEQ ID NO:136, SEQ ID NO:137, SEQ ID NO:138, SEQ ID NO:139, SEQ ID NO:140, SEQ ID NO:141, SEQ ID NO:142, SEQ ID NO:143, SEQ ID NO:144, SEQ ID NO:145, SEQ ID NO:146, SEQ ID NO:147, SEQ ID NO:148, SEQ ID NO:149, SEQ ID NO:150, SEQ ID NO:151, SEQ ID NO:152, SEQ ID NO:153, SEQ ID NO:154, SEQ ID NO:155, SEQ ID NO:156, SEQ ID NO:157, SEQ ID NO:158, SEQ ID NO:159, SEQ ID NO:160, SEQ ID NO:161, SEQ ID NO:162, SEQ ID NO:163, SEQ ID NO:164, SEQ ID NO:165. SEQ ID NO:166, SEQ ID NO:167, SEQ ID NO:168, SEQ ID NO:169, SEQ ID NO:170, SEQ ID NO:171, SEQ ID NO:172, SEQ ID NO:173, SEQ ID NO:174, SEQ ID NO:175, SEQ ID NO:176, SEQ ID NO:177, SEQ ID NO:178, SEQ ID NO:179, SEQ ID NO:180, SEQ ID NO:181, SEQ ID NO:182, SEQ ID NO:183, SEQ ID NO:184, SEQ ID NO:185, SEQ ID NO:186, SEQ ID NO:187, SEQ ID NO:188, SEQ ID NO:189, SEQ ID NO:190, SEQ ID NO:191, SEQ ID NO:199, SEQ ID NO:193, SEQ ID NO:194, SEQ ID NO:195, SEQ ID NO:196, SEQ ID NO:197, SEQ ID NO:198, SEQ ID NO:199, SEQ ID NO:200, SEQ ID NO:201, SEQ ID NO:202, SEQ ID NO:203, SEQ ID NO:204, SEQ ID NO:205, SEQ ID NO:206, SEQ ID NO:207, SEQ ID NO:208, SEQ ID NO:209, SEQ ID NO:210, SEQ ID NO:211, SEQ ID NO:212, SEQ ID NO:213, SEQ ID NO:214, SEQ ID NO:215, SEQ ID NO:216, SEQ ID NO:217, SEQ ID NO:218, SEQ ID NO:219, SEQ ID NO:220, SEQ ID NO:221, SEQ ID NO:222, SEQ ID NO:223, SEQ ID NO:224, SEQ ID NO:225, SEQ ID NO:226, SEQ ID NO:227, SEQ ID NO:228, SEQ ID NO:229, SEQ ID NO:230, SEQ ID NO:231, SEQ ID NO:232, SEQ ID NO:233, SEQ ID NO:234, SEQ ID NO:235, SEQ ID NO:236, SEQ ID NO:237, SEQ ID NO:238, SEQ ID NO:239, SEQ ID NO:240, SEQ ID NO:241, and SEQ ID NO:242, except that it lacks one or more, but not all, of a domain selected from the group consisting of an N-terminal domain, a catalytic domain, a C-terminal domain, a coiled-coil structure region, a proline-rich region, a spacer region, an insert, and a C-terminal tail; (e) is the complement of the nucleotide sequence of (d); (f) encodes a polypeptide having an amino acid sequence selected from the group consisting of those set forth in SEQ ID NO:122, SEQ ID NO:123, SEQ ID NO:124, SEQ ID NO:125, SEQ ID NO:126, SEQ ID NO:127, SEQ ID NO:128, SEQ ID NO:129, SEQ ID NO:130, SEQ ID NO:131, SEQ ID NO:132, SEQ ID NO:133, SEQ ID NO:134, SEQ ID NO:135, SEQ ID NO:136, SEQ ID NO:137, SEQ ID NO:138, SEQ ID NO:139, SEQ ID NO:140, SEQ ID NO:141, SEQ ID NO:142, SEQ ID NO:143, SEQ ID NO:144, SEQ ID NO:145, SEQ ID NO:146, SEQ ID NO:147, SEQ ID NO:148, SEQ ID NO:149, SEQ ID NO:150, SEQ ID NO:151, SEQ ID NO:152, SEQ ID NO:153, SEQ ID NO:154, SEQ ID NO:155, SEQ ID NO:156, SEQ ID NO:157, SEQ ID NO:158, SEQ ID NO:159, SEQ ID NO:160, SEQ ID NO:161, SEQ ID NO:162, SEQ ID NO:163, SEQ ID NO:164, SEQ ID NO:165. SEQ ID NO:166, SEQ ID NO:167, SEQ ID NO:168, SEQ ID NO:169, SEQ ID NO:170, SEQ ID NO:171, SEQ ID NO:172, SEQ ID NO:173, SEQ ID NO:174, SEQ ID NO:175, SEQ ID NO:176, SEQ ID NO:177, SEQ ID NO:178, SEQ ID NO:179, SEQ ID NO:180, SEQ ID NO:181, SEQ ID NO:182, SEQ ID NO:183, SEQ ID NO:184, SEQ ID NO:185, SEQ ID NO:186, SEQ ID NO:187, SEQ ID NO:188, SEQ ID NO:189, SEQ ID NO:190, SEQ ID NO:191, SEQ ID NO:199, SEQ ID NO:193, SEQ ID NO:194, SEQ ID NO:195, SEQ ID NO:196, SEQ ID NO:197, SEQ ID NO:198, SEQ ID NO:199, SEQ ID NO:200, SEQ ID NO:201, SEQ ID NO:202, SEQ ID NO:203, SEQ ID NO:204, SEQ ID NO:205, SEQ ID NO:206, SEQ ID NO:207, SEQ ID NO:208, SEQ ID NO:209, SEQ ID NO:210, SEQ ID NO:211, SEQ ID NO:212, SEQ ID NO:213, SEQ ID NO:214, SEQ ID NO:215, SEQ ID NO:216, SEQ ID NO:217, SEQ ID NO:218, SEQ ID NO:219, SEQ ID NO:220, SEQ ID NO:221, SEQ ID NO:222, SEQ ID NO:223, SEQ ID NO:224, SEQ ID NO:225, SEQ ID NO:226, SEQ ID NO:227, SEQ ID NO:228, SEQ ID NO:229, SEQ ID NO:230, SEQ ID NO:231, SEQ ID NO:232, SEQ ID NO:233, SEQ ID NO:234, SEQ ID NO:235, SEQ ID NO:236, SEQ ID NO:237, SEQ ID NO:238, SEQ ID NO:239, SEQ ID NO:240, SEQ ID NO:241, and SEQ ID NO:242, or the corresponding full-length amino acid sequence, or fragments thereof (The domain demarcations of the polypeptides of the invention are indicated in Table 2 by reference to the kinase domain.) A sequence that is substantially similar to a sequence selected from the group consisting of those set forth in SEQ ID NO:122, SEQ ID NO:123, SEQ ID NO:124, SEQ ID NO:125, SEQ ID NO:126, SEQ ID NO:127, SEQ ID NO:128, SEQ ID NO:129, SEQ ID NO:130, SEQ ID NO:131, SEQ ID NO:132, SEQ ID NO:133, SEQ ID NO:134, SEQ ID NO:135, SEQ ID NO:136, SEQ ID NO:137, SEQ ID NO:138, SEQ ID NO:139, SEQ ID NO:140, SEQ ID NO:141, SEQ ID NO:142, SEQ ID NO:143, SEQ ID NO:144, SEQ ID NO:145, SEQ ID NO:146, SEQ ID NO:147, SEQ ID NO:148, SEQ ID NO:149, SEQ ID NO:150, SEQ ID NO:151, SEQ ID NO:152, SEQ ID NO:153, SEQ ID NO:154, SEQ ID NO:155, SEQ ID NO:156, SEQ ID NO:157, SEQ ID NO:158, SEQ ID NO:159, SEQ ID NO:160, SEQ ID NO:161, SEQ ID NO:162, SEQ ID NO:163, SEQ ID NO:164, SEQ ID NO:165. SEQ ID NO:166, SEQ ID NO:167, SEQ ID NO:168, SEQ ID NO:169, SEQ ID NO:170, SEQ ID NO:171, SEQ ID NO:172, SEQ ID NO:173, SEQ ID NO:174, SEQ ID NO:175, SEQ ID NO:176, SEQ ID NO:177, SEQ ID NO:178, SEQ ID NO:179, SEQ ID NO:180, SEQ ID NO:181, SEQ ID NO:182, SEQ ID NO:183, SEQ ID NO:184, SEQ ID NO:185, SEQ ID NO:186, SEQ ID NO:187, SEQ ID NO:188, SEQ ID NO:189, SEQ ID NO:190, SEQ ID NO:191, SEQ ID NO:199, SEQ ID NO:193, SEQ ID NO:194, SEQ ID NO:195, SEQ ID NO:196, SEQ ID NO:197, SEQ ID NO:198, SEQ ID NO:199, SEQ ID NO:200, SEQ ID NO:201, SEQ ID NO:202, SEQ ID NO:203, SEQ ID NO:204, SEQ ID NO:205, SEQ ID NO:206, SEQ ID NO:207, SEQ ID NO:208, SEQ ID NO:209, SEQ ID NO:210, SEQ ID NO:211, SEQ ID NO:212, SEQ ID NO:213, SEQ ID NO:214, SEQ ID NO:215, SEQ ID NO:216, SEQ ID NO:217, SEQ ID NO:218, SEQ ID NO:219, SEQ ID NO:220, SEQ ID NO:221, SEQ ID NO:222, SEQ ID NO:223, SEQ ID NO:224, SEQ ID NO:225, SEQ ID NO:226, SEQ ID NO:227, SEQ ID NO:228, SEQ ID NO:229, SEQ ID NO:230, SEQ ID NO:231, SEQ ID NO:232, SEQ ID NO:233, SEQ ID NO:234, SEQ ID NO:235, SEQ ID NO:236, SEQ ID NO:237, SEQ ID NO:238, SEQ ID NO:239, SEQ ID NO:240, SEQ ID NO:241, and SEQ ID NO:242 will have at least 75% identity (preferably 90%, more preferably at least 95% and most preferably 99-100%) to the sequence selected from the group consisting of those set forth in SEQ ID NO:122, SEQ ID NO:123, SEQ ID NO:124, SEQ ID NO:125, SEQ ID NO:126, SEQ ID NO:127, SEQ ID NO:128, SEQ ID NO:129, SEQ ID NO:130, SEQ ID NO:131, SEQ ID NO:132, SEQ ID NO:133, SEQ ID NO:134, SEQ ID NO:135, SEQ ID NO:136, SEQ ID NO:137, SEQ ID NO:138, SEQ ID NO:139, SEQ ID NO:140, SEQ ID NO:141, SEQ ID NO:142, SEQ ID NO:143, SEQ ID NO:144, SEQ ID NO:145, SEQ ID NO:146, SEQ ID NO:147, SEQ ID NO:148, SEQ ID NO:149, SEQ ID NO:150, SEQ ID NO:151, SEQ ID NO:152, SEQ ID NO:153, SEQ ID NO:154, SEQ ID NO:155, SEQ ID NO:156, SEQ ID NO:157, SEQ ID NO:158, SEQ ID NO:159, SEQ ID NO:160, SEQ ID NO:161, SEQ ID NO:162, SEQ ID NO:163, SEQ ID NO:164, SEQ ID NO:165. SEQ ID NO:166, SEQ ID NO:167, SEQ ID NO:168, SEQ ID NO:169, SEQ ID NO:170, SEQ ID NO:171, SEQ ID NO:172, SEQ ID NO:173, SEQ ID NO:174, SEQ ID NO:175, SEQ ID NO:176, SEQ ID NO:177, SEQ ID NO:178, SEQ ID NO:179, SEQ ID NO:180, SEQ ID NO:181, SEQ ID NO:182, SEQ ID NO:183, SEQ ID NO:184, SEQ ID NO:185, SEQ ID NO:186, SEQ ID NO:187, SEQ ID NO:188, SEQ ID NO:189, SEQ ID NO:190, SEQ ID NO:191, SEQ ID NO:199, SEQ ID NO:193, SEQ ID NO:194, SEQ ID NO:195, SEQ ID NO:196, SEQ ID NO:197, SEQ ID NO:198, SEQ ID NO:199, SEQ ID NO:200, SEQ ID NO:201, SEQ ID NO:202, SEQ ID NO:203, SEQ ID NO:204, SEQ ID NO:205, SEQ ID NO:206, SEQ ID NO:207, SEQ ID NO:208, SEQ ID NO:209, SEQ ID NO:210, SEQ ID NO:211, SEQ ID NO:212, SEQ ID NO:213, SEQ ID NO:214, SEQ ID NO:215, SEQ ID NO:216, SEQ ID NO:217, SEQ ID NO:218, SEQ ID NO:219, SEQ ID NO:220, SEQ ID NO:221, SEQ ID NO:222, SEQ ID NO:223, SEQ ID NO:224, SEQ ID NO:225, SEQ ID NO:226, SEQ ID NO:227, SEQ ID NO:228, SEQ ID NO:229, SEQ ID NO:230, SEQ ID NO:231, SEQ ID NO:232, SEQ ID NO:233, SEQ ID NO:234, SEQ ID NO:235, SEQ ID NO:236, SEQ ID NO:237, SEQ ID NO:238, SEQ ID NO:239, SEQ ID NO:240, SEQ ID NO:241, and SEQ ID NO:242; (b) is the complement of the nucleotide sequence of (a); (c) hybridizes under highly stringent conditions to the nucleotide molecule of (a) and encodes a naturally occurring kinase polypeptide; (d) encodes a kinase polypeptide having an amino acid sequence selected from the group consisting of those set forth in SEQ ID NO:122, SEQ ID NO:123, SEQ ID NO:124, SEQ ID NO:125, SEQ ID NO:126, SEQ ID NO:127, SEQ ID NO:128, SEQ ID NO:129, SEQ ID NO:130, SEQ ID NO:131, SEQ ID NO:132, SEQ ID NO:133, SEQ ID NO:134, SEQ ID NO:135, SEQ ID NO:136, SEQ ID NO:137, SEQ ID NO:138, SEQ ID NO:139, SEQ ID NO:140, SEQ ID NO:141, SEQ ID NO:142, SEQ ID NO:143, SEQ ID NO:144, SEQ ID NO:145, SEQ ID NO:146, SEQ ID NO:147, SEQ ID NO:148, SEQ ID NO:149, SEQ ID NO:150, SEQ ID NO:151, SEQ ID NO:152, SEQ ID NO:153, SEQ ID NO:154, SEQ ID NO:155, SEQ ID NO:156, SEQ ID NO:157, SEQ ID NO:158, SEQ ID NO:159, SEQ ID NO:160, SEQ ID NO:161, SEQ ID NO:162, SEQ ID NO:163, SEQ ID NO:164, SEQ ID NO:165. SEQ ID NO:166, SEQ ID NO:167, SEQ ID NO:168, SEQ ID NO:169, SEQ ID NO:170, SEQ ID NO:171, SEQ ID NO:172, SEQ ID NO:173, SEQ ID NO:174, SEQ ID NO:175, SEQ ID NO:176, SEQ ID NO:177, SEQ ID NO:178, SEQ ID NO:179, SEQ ID NO:180, SEQ ID NO:181, SEQ ID NO:182, SEQ ID NO:183, SEQ ID NO:184, SEQ ID NO:185, SEQ ID NO:186, SEQ ID NO:187, SEQ ID NO:188, SEQ ID NO:189, SEQ ID NO:190, SEQ ID NO:191, SEQ ID NO:199, SEQ ID NO:193, SEQ ID NO:194, SEQ ID NO:195, SEQ ID NO:196, SEQ ID NO:197, SEQ ID NO:198, SEQ ID NO:199, SEQ ID NO:200, SEQ ID NO:201, SEQ ID NO:202, SEQ ID NO:203, SEQ ID NO:204, SEQ ID NO:205, SEQ ID NO:206, SEQ ID NO:207, SEQ ID NO:208, SEQ ID NO:209, SEQ ID NO:210, SEQ ID NO:211, SEQ ID NO:212, SEQ ID NO:213, SEQ ID NO:214, SEQ ID NO:215, SEQ ID NO:216, SEQ ID NO:217, SEQ ID NO:218, SEQ ID NO:219, SEQ ID NO:220, SEQ ID NO:221, SEQ ID NO:222, SEQ ID NO:223, SEQ ID NO:224, SEQ ID NO:225, SEQ ID NO:226, SEQ ID NO:227, SEQ ID NO:228, SEQ ID NO:229, SEQ ID NO:230, SEQ ID NO:231, SEQ ID NO:232, SEQ ID NO:233, SEQ ID NO:234, SEQ ID NO:235, SEQ ID NO:236, SEQ ID NO:237, SEQ ID NO:238, SEQ ID NO:239, SEQ ID NO:240, SEQ ID NO:241, and SEQ ID NO:242, or the corresponding full-length amino acid sequence, or fragments thereof. A sequence that is substantially similar to a sequence selected from the group consisting of those set forth in SEQ ID NO:122, SEQ ID NO:123, SEQ ID NO:124, SEQ ID NO:125, SEQ ID NO:126, SEQ ID NO:127, SEQ ID NO:128, SEQ ID NO:129, SEQ ID NO:130, SEQ ID NO:131, SEQ ID NO:132, SEQ ID NO:133, SEQ ID NO:134, SEQ ID NO:135, SEQ ID NO:136, SEQ ID NO:137, SEQ ID NO:138, SEQ ID NO:139, SEQ ID NO:140, SEQ ID NO:141, SEQ ID NO:142, SEQ ID NO:143, SEQ ID NO:144, SEQ ID NO:145, SEQ ID NO:146, SEQ ID NO:147, SEQ ID NO:148, SEQ ID NO:149, SEQ ID NO:150, SEQ ID NO:151, SEQ ID NO:152, SEQ ID NO:153, SEQ ID NO:154, SEQ ID NO:155, SEQ ID NO:156, SEQ ID NO:157, SEQ ID NO:158, SEQ ID NO:159, SEQ ID NO:160, SEQ ID NO:161, SEQ ID NO:162, SEQ ID NO:163, SEQ ID NO:164, SEQ ID NO:165. SEQ ID NO:166, SEQ ID NO:167, SEQ ID NO:168, SEQ ID NO:169, SEQ ID NO:170, SEQ ID NO:171, SEQ ID NO:172, SEQ ID NO:173, SEQ ID NO:174, SEQ ID NO:175, SEQ ID NO:176, SEQ ID NO:177, SEQ ID NO:178, SEQ ID NO:179, SEQ ID NO:180, SEQ ID NO:181, SEQ ID NO:182, SEQ ID NO:183, SEQ ID NO:184, SEQ ID NO:185, SEQ ID NO:186, SEQ ID NO:187, SEQ ID NO:188, SEQ ID NO:189, SEQ ID NO:190, SEQ ID NO:191, SEQ ID NO:199, SEQ ID NO:193, SEQ ID NO:194, SEQ ID NO:195, SEQ ID NO:196, SEQ ID NO:197, SEQ ID NO:198, SEQ ID NO:199, SEQ ID NO:200, SEQ ID NO:201, SEQ ID NO:202, SEQ ID NO:203, SEQ ID NO:204, SEQ ID NO:205, SEQ ID NO:206, SEQ ID NO:207, SEQ ID NO:208, SEQ ID NO:209, SEQ ID NO:210, SEQ ID NO:211, SEQ ID NO:212, SEQ ID NO:213, SEQ ID NO:214, SEQ ID NO:215, SEQ ID NO:216, SEQ ID NO:217, SEQ ID NO:218, SEQ ID NO:219, SEQ ID NO:220, SEQ ID NO:221, SEQ ID NO:222, SEQ ID NO:223, SEQ ID NO:224, SEQ ID NO:225, SEQ ID NO:226, SEQ ID NO:227, SEQ ID NO:228, SEQ ID NO:229, SEQ ID NO:230, SEQ ID NO:231, SEQ ID NO:232, SEQ ID NO:233, SEQ ID NO:234, SEQ ID NO:235, SEQ ID NO:236, SEQ ID NO:237, SEQ ID NO:238, SEQ ID NO:239, SEQ ID NO:240, SEQ ID NO:241, and SEQ ID NO:242 will have at least 75% identity (preferably 90%, more preferably at least 95% and most preferably 99-100%) to a domain of a polypeptide selected from the group consisting of those set forth in SEQ ID NO:122, SEQ ID NO:123, SEQ ID NO:124, SEQ ID NO:125, SEQ ID NO:126, SEQ ID NO:127, SEQ ID NO:128, SEQ ID NO:129, SEQ ID NO:130, SEQ ID NO:131, SEQ ID NO:132, SEQ ID NO:133, SEQ ID NO:134, SEQ ID NO:135, SEQ ID NO:136, SEQ ID NO:137, SEQ ID NO:138, SEQ ID NO:139, SEQ ID NO:140, SEQ ID NO:141, SEQ ID NO:142, SEQ ID NO:143, SEQ ID NO:144, SEQ ID NO:145, SEQ ID NO:146, SEQ ID NO:147, SEQ ID NO:148, SEQ ID NO:149, SEQ ID NO:150, SEQ ID NO:151, SEQ ID NO:152, SEQ ID NO:153, SEQ ID NO:154, SEQ ID NO:155, SEQ ID NO:156, SEQ ID NO:157, SEQ ID NO:158, SEQ ID NO:159, SEQ ID NO:160, SEQ ID NO:161, SEQ ID NO:162, SEQ ID NO:163, SEQ D) NO:164, SEQ ID NO:165. SEQ ID NO:166, SEQ ID NO:167, SEQ ID NO:168, SEQ ID NO:169, SEQ ID NO:170, SEQ ID NO:171, SEQ ID NO:172, SEQ ID NO:173, SEQ ID NO:174, SEQ ID NO:175, SEQ ID NO:176, SEQ ID NO:177, SEQ ID NO:178, SEQ ID NO:179, SEQ ID NO:180, SEQ ID NO:181, SEQ ID NO:182, SEQ ID NO:183, SEQ ID NO:184, SEQ ID NO:185, SEQ ID NO:186, SEQ ID NO:187, SEQ ID NO:188, SEQ ID NO:189, SEQ ID NO:190, SEQ ID NO:191, SEQ ID NO:199, SEQ ID NO:193, SEQ ID NO:194, SEQ ID NO:195, SEQ ID NO:196, SEQ ID NO:197, SEQ ID NO:198, SEQ ID NO:199, SEQ ID NO:200, SEQ ID NO:201, SEQ ID NO:202, SEQ ID NO:203, SEQ ID NO:204, SEQ ID NO:205, SEQ ID NO:206, SEQ ID NO:207, SEQ ID NO:208, SEQ ID NO:209, SEQ ID NO:210, SEQ ID NO:211, SEQ ID NO:212, SEQ ID NO:213, SEQ ID NO:214, SEQ ID NO:215, SEQ ID NO:216, SEQ ID NO:217, SEQ ID NO:218, SEQ ID NO:219, SEQ ID NO:220, SEQ ID NO:221, SEQ ID NO:222, SEQ ID NO:223, SEQ ID NO:224, SEQ ID NO:225, SEQ ID NO:226, SEQ ID NO:227, SEQ ID NO:228, SEQ ID NO:229, SEQ ID NO:230, SEQ ID NO:231, SEQ ID NO:232, SEQ ID NO:233, SEQ ID NO:234, SEQ ID NO:235, SEQ ID NO:236, SEQ ID NO:237, SEQ ID NO:238, SEQ ID NO:239, SEQ ID NO:240, SEQ ID NO:241, and SEQ ID NO:242, where the domain is selected from the group consisting of an N-terminal domain, a catalytic domain, a C-terminal domain, a coiled-coil structure region, a proline-rich region, a spacer region, an insert, and a C-terminal tail; (g) is the complement of the nucleotide sequence of (f); (h) encodes a polypeptide having an amino acid sequence selected from the group consisting of those set forth in SEQ ID NO:122, SEQ ID NO:123, SEQ ID NO:124, SEQ ID NO:125, SEQ ID NO:126, SEQ ID NO:127, SEQ ID NO:128, SEQ ID NO:129, SEQ ID NO:130, SEQ ID NO:131, SEQ ID NO:132, SEQ ID NO:133, SEQ ID NO:134, SEQ ID NO:135, SEQ ID NO:136, SEQ ID NO:137, SEQ ID NO:138, SEQ ID NO:139, SEQ ID NO:140, SEQ ID NO:141, SEQ ID NO:142, SEQ ID NO:143, SEQ ID NO:144, SEQ ID NO:145, SEQ ID NO:146, SEQ ID NO:147, SEQ ID NO:148, SEQ ID NO:149, SEQ ID NO:150, SEQ ID NO:151, SEQ ID NO:152, SEQ ID NO:153, SEQ ID NO:154, SEQ ID NO:155, SEQ ID NO:156, SEQ ID NO:157, SEQ ID NO:158, SEQ ID NO:159, SEQ ID NO:160, SEQ ID NO:161, SEQ ID NO:162, SEQ ID NO:163, SEQ ID NO:164, SEQ ID NO:165. SEQ ID NO:166, SEQ ID NO:167, SEQ ID NO:168, SEQ ID NO:169, SEQ ID NO:170, SEQ ID NO:171, SEQ ID NO:172, SEQ ID NO:173, SEQ ID NO:174, SEQ ID NO:175, SEQ ID NO:176, SEQ ID NO:177, SEQ ID NO:178, SEQ ID NO:179, SEQ ID NO:180, SEQ ID NO:181, SEQ ID NO:182, SEQ ID NO:183, SEQ ID NO:184, SEQ ID NO:185, SEQ ID NO:186, SEQ ID NO:187, SEQ ID NO:188, SEQ ID NO:189, SEQ ID NO:190, SEQ ID NO:191, SEQ ID NO:199, SEQ ID NO:193, SEQ ID NO:194, SEQ ID NO:195, SEQ ID NO:196, SEQ ID NO:197, SEQ ID NO:198, SEQ ID NO:199, SEQ ID NO:200, SEQ ID NO:201, SEQ ID NO:202, SEQ ID NO:203, SEQ ID NO:204, SEQ ID NO:205, SEQ ID NO:206, SEQ ID NO:207, SEQ ID NO:208, SEQ ID NO:209, SEQ ID NO:210, SEQ ID NO:211, SEQ ID NO:212, SEQ ID NO:213, SEQ ID NO:214, SEQ ID NO:215, SEQ ID NO:216, SEQ ID NO:217, SEQ ID NO:218, SEQ ID NO:219, SEQ ID NO:220, SEQ ID NO:221, SEQ ID NO:222, SEQ ID NO:223, SEQ ID NO:224, SEQ ID NO:225, SEQ ID NO:226, SEQ ID NO:227, SEQ ID NO:228, SEQ ID NO:229, SEQ ID NO:230, SEQ ID NO:231, SEQ ID NO:232, SEQ ID NO:233, SEQ ID NO:234, SEQ ID NO:235, SEQ ID NO:236, SEQ ID NO:237, SEQ ID NO:238, SEQ ID NO:239, SEQ ID NO:240, SEQ ID NO:241, and SEQ ID NO:242, or the corresponding full-length amino acid sequence, or fragments thereof A sequence that is substantially similar to a sequence selected from the group consisting of those set forth in SEQ ID NO:122, SEQ ID NO:123, SEQ ID NO:124, SEQ ID NO:125, SEQ ID NO:126, SEQ ID NO:127, SEQ ID NO:128, SEQ ID NO:129, SEQ ID NO:130, SEQ ID NO:131, SEQ ID NO:132, SEQ ID NO:133, SEQ ID NO:134, SEQ ID NO:135, SEQ ID NO:136, SEQ ID NO:137, SEQ ID NO:138, SEQ ID NO:139, SEQ ID NO:140, SEQ ID NO:141, SEQ ID NO:142, SEQ ID NO:143, SEQ ID NO:144, SEQ ID NO:145, SEQ ID NO:146, SEQ ID NO:147, SEQ ID NO:148, SEQ ID NO:149, SEQ ID NO:150, SEQ ID NO:151, SEQ ID NO:152, SEQ ID NO:153, SEQ ID NO:154, SEQ ID NO:155, SEQ ID NO:156, SEQ ID NO:157, SEQ ID NO:158, SEQ ID NO:159, SEQ ID NO:160, SEQ ID NO:161, SEQ ID NO:162, SEQ ID NO:163, SEQ ID NO:164, SEQ ID NO:165. SEQ ID NO:166, SEQ ID NO:167, SEQ ID NO:168, SEQ ID NO:169, SEQ ID NO:170, SEQ ID NO:171, SEQ ID NO:172, SEQ ID NO:173, SEQ ID NO:174, SEQ ID NO:175, SEQ ID NO:176, SEQ ID NO:177, SEQ ID NO:178, SEQ ID NO:179, SEQ ID NO:180, SEQ ID NO:181, SEQ ID NO:182, SEQ ID NO:183, SEQ ID NO:184, SEQ ID NO:185, SEQ ID NO:186, SEQ ID NO:187, SEQ ID NO:188, SEQ ID NO:189, SEQ ID NO:190, SEQ ID NO:191, SEQ ID NO:199, SEQ ID NO:193, SEQ ID NO:194, SEQ ID NO:195, SEQ ID NO:196, SEQ ID NO:197, SEQ ID NO:198, SEQ ID NO:199, SEQ ID NO:200, SEQ ID NO:201, SEQ ID NO:202, SEQ ID NO:203, SEQ ID NO:204, SEQ ID NO:205, SEQ ID NO:206, SEQ ID NO:207, SEQ ID NO:208, SEQ ID NO:209, SEQ ID NO:210, SEQ ID NO:211, SEQ ID NO:212, SEQ ID NO:213, SEQ ID NO:214, SEQ ID NO:215, SEQ ID NO:216, SEQ ID NO:217, SEQ ID NO:218, SEQ ID NO:219, SEQ ID NO:220, SEQ ID NO:221, SEQ ID NO:222, SEQ ID NO:223, SEQ ID NO:224, SEQ ID NO:225, SEQ ID NO:226, SEQ ID NO:227, SEQ ID NO:228, SEQ ID NO:229, SEQ ID NO:230, SEQ ID NO:231, SEQ ID NO:232, SEQ ID NO:233, SEQ ID NO:234, SEQ ID NO:235, SEQ ID NO:236, SEQ ID NO:237, SEQ ID NO:238, SEQ ID NO:239, SEQ ID NO:240, SEQ ID NO:241, and SEQ ID NO:242 will have at least 75% identity (preferably 90%, more preferably at least 95% and most preferably 99-100%) to the sequence selected from-the group consisting of those set forth in SEQ ID NO:122, SEQ ID NO:123, SEQ ID NO:124, SEQ ID NO:125, SEQ ID NO:126, SEQ ID NO:127, SEQ ID NO:128, SEQ ID NO:129, SEQ ID NO:130, SEQ ID NO:131, SEQ ID NO:132, SEQ ID NO:133, SEQ ID NO:134, SEQ ID NO:135, SEQ ID NO:136, SEQ ID NO:137, SEQ ID NO:138, SEQ ID NO:139, SEQ ID NO:140, SEQ ID NO:141, SEQ ID NO:142, SEQ ID NO:143, SEQ ID NO:144, SEQ ID NO:145, SEQ ID NO:146, SEQ ID NO:147, SEQ ID NO:148, SEQ ID NO:149, SEQ ID NO:150, SEQ ID NO:151, SEQ ID NO:152, SEQ ID NO:153, SEQ ID NO:154, SEQ ID NO:155, SEQ ID NO:156, SEQ ID NO:157, SEQ ID NO:158, SEQ ID NO:159, SEQ ID NO:160, SEQ ID NO:161, SEQ ID NO:162, SEQ ID NO:163, SEQ ID NO:164, SEQ ID NO:165. SEQ ID NO:166, SEQ ID NO:167, SEQ ID NO:168, SEQ ID NO:169, SEQ ID NO:170, SEQ ID NO:171, SEQ ID NO:172, SEQ ID NO:173, SEQ ID NO:174, SEQ ID NO:175, SEQ ID NO:176, SEQ ID NO:177, SEQ ID NO:178, SEQ ID NO:179, SEQ ID NO:180, SEQ ID NO:181, SEQ ID NO:182, SEQ ID NO:183, SEQ ID NO:184, SEQ ID NO:185, SEQ ID NO:186, SEQ ID NO:187, SEQ ID NO:188, SEQ ID NO:189, SEQ ID NO:190, SEQ ID NO:191, SEQ ID NO:199, SEQ ID NO:193, SEQ ID NO:194, SEQ ID NO:195, SEQ ID NO:196, SEQ ID NO:197, SEQ ID NO:198, SEQ ID NO:199, SEQ ID NO:200, SEQ ID NO:201, SEQ ID NO:202, SEQ ID NO:203, SEQ ID NO:204, SEQ ID NO:205, SEQ ID NO:206, SEQ ID NO:207, SEQ ID NO:208, SEQ ID NO:209, SEQ ID NO:210, SEQ ID NO:211, SEQ ID NO:212, SEQ ID NO:213, SEQ ID NO:214, SEQ ID NO:215, SEQ ID NO:216, SEQ ID NO:217, SEQ ID NO:218, SEQ ID NO:219, SEQ ID NO:220, SEQ ID NO:221, SEQ ID NO:222, SEQ ID NO:223, SEQ ID NO:224, SEQ ID NO:225, SEQ ID NO:226, SEQ ID NO:227, SEQ ID NO:228, SEQ ID NO:229, SEQ ID NO:230, SEQ ID NO:231, SEQ ID NO:232, SEQ ID NO:233, SEQ ID NO:234, SEQ ID NO:235, SEQ ID NO:236, SEQ ID NO:237, SEQ ID NO:238, SEQ ID NO:239, SEQ ID NO:240, SEQ ID NO:241, and SEQ ID NO:242; (b) is the complement of the nucleotide sequence of (a); (c) hybridizes under highly stringent conditions to the nucleotide molecule of (a) and encodes a naturally occurring kinase polypeptide; (d) encodes a kinase polypeptide having an amino acid sequence selected from the group consisting of those set forth in SEQ ID NO:122, SEQ ID NO:123, SEQ ID NO:124, SEQ ID NO:125, SEQ ID NO:126, SEQ ID NO:127, SEQ ID NO:128, SEQ ID NO:129, SEQ ID NO:130, SEQ ID NO:131, SEQ ID NO:132, SEQ ID NO:133, SEQ ID NO:134, SEQ ID NO:135, SEQ ID NO:136, SEQ ID NO:137, SEQ ID NO:138, SEQ ID NO:139, SEQ ID NO:140, SEQ ID NO:141, SEQ ID NO:142, SEQ ID NO:143, SEQ ID NO:144, SEQ ID NO:145, SEQ ID NO:146, SEQ ID NO:147, SEQ ID NO:148, SEQ ID NO:149, SEQ ID NO:150, SEQ ID NO:151, SEQ ID NO:152, SEQ ID NO:153, SEQ ID NO:154, SEQ ID NO:155, SEQ ID NO:156, SEQ ID NO:157, SEQ ID NO:158, SEQ ID NO:159, SEQ ID NO:160, SEQ ID NO:161, SEQ ID NO:162, SEQ ID NO:163, SEQ ID NO:164, SEQ ID NO:165. SEQ ID NO:166, SEQ ID NO:167, SEQ ID NO:168, SEQ ID NO:169, SEQ ID NO:170, SEQ ID NO:171, SEQ ID NO:172, SEQ ID NO:173, SEQ ID NO:174, SEQ ID NO:175, SEQ ID NO:176, SEQ ID NO:177, SEQ ID NO:178, SEQ ID NO:179, SEQ ID NO:180, SEQ ID NO:181, SEQ ID NO:182, SEQ ID NO:183, SEQ ID NO:184, SEQ ID NO:185, SEQ ID NO:186, SEQ ID NO:187, SEQ ID NO:188, SEQ ID NO:189, SEQ ID NO:190, SEQ ID NO:191, SEQ ID NO:199, SEQ ID NO:193, SEQ ID NO:194, SEQ ID NO:195, SEQ ID NO:196, SEQ ID NO:197, SEQ ID NO:198, SEQ ID NO:199, SEQ ID NO:200, SEQ ID NO:201, SEQ ID NO:202, SEQ ID NO:203, SEQ ID NO:204, SEQ ID NO:205, SEQ ID NO:206, SEQ ID NO:207, SEQ ID NO:208, SEQ ID NO:209, SEQ ID NO:210, SEQ ID NO:211, SEQ ID NO:212, SEQ ID NO:213, SEQ ID NO:214, SEQ ID NO:215, SEQ ID NO:216, SEQ ID NO:217, SEQ ID NO:218, SEQ ID NO:219, SEQ ID NO:220, SEQ ID NO:221, SEQ ID NO:222, SEQ ID NO:223, SEQ ID NO:224, SEQ ID NO:225, SEQ ID NO:226, SEQ ID NO:227, SEQ ID NO:228, SEQ ID NO:229, SEQ ID NO:230, SEQ ID NO:231, SEQ ID NO:232, SEQ ID NO:233, SEQ ID NO:234, SEQ ID NO:235, SEQ ID NO:236, SEQ ID NO:237, SEQ ID NO:238, SEQ ID NO:239, SEQ ID NO:240, SEQ ID NO:241, and SEQ ID NO:242, or the corresponding full-length amino acid sequence, or fragments thereof A sequence that is substantially similar to a sequence selected from the group consisting of those set forth in SEQ ID NO:122, SEQ ID NO:123, SEQ ID NO:124, SEQ ID NO:125, SEQ ID NO:126, SEQ ID NO:127, SEQ ID NO:128, SEQ ID NO:129, SEQ ID NO:130, SEQ ID NO:131, SEQ ID NO:132, SEQ ID NO:133, SEQ ID NO:134, SEQ ID NO:135, SEQ ID NO:136, SEQ ID NO:137, SEQ ID NO:138, SEQ ID NO:139, SEQ ID NO:140, SEQ ID NO:141, SEQ ID NO:142, SEQ ID NO:143, SEQ ID NO:144, SEQ ID NO:145, SEQ ID NO:146, SEQ ID NO:147, SEQ ID NO:148, SEQ ID NO:149, SEQ ID NO:150, SEQ ID NO:151, SEQ ID NO:152, SEQ ID NO:153, SEQ ID NO:154, SEQ ID NO:155, SEQ ID NO:156, SEQ ID NO:157, SEQ ID NO:158, SEQ ID NO:159, SEQ ID NO:160, SEQ ID NO:161, SEQ ID NO:162, SEQ ID NO:163, SEQ ID NO:164, SEQ ID NO:165. SEQ ID NO:166, SEQ ID NO:167, SEQ ID NO:168, SEQ ID NO:169, SEQ ID NO:170, SEQ ID NO:171, SEQ ID NO:172, SEQ ID NO:173, SEQ ID NO:174, SEQ ID NO:175, SEQ ID NO:176, SEQ ID NO:177, SEQ ID NO:178, SEQ ID NO:179, SEQ ID NO:180, SEQ ID NO:181, SEQ ID NO:182, SEQ ID NO:183, SEQ ID NO:184, SEQ ID NO:185, SEQ ID NO:186, SEQ ID NO:187, SEQ ID NO:188, SEQ ID NO:189, SEQ ID NO:190, SEQ ID NO:191, SEQ ID NO:199, SEQ ID NO:193, SEQ ID NO:194, SEQ ID NO:195, SEQ ID NO:196, SEQ ID NO:197, SEQ ID NO:198, SEQ ID NO:199, SEQ ID NO:200, SEQ ID NO:201, SEQ ID NO:202, SEQ ID NO:203, SEQ ID NO:204, SEQ ID NO:205, SEQ ID NO:206, SEQ ID NO:207, SEQ ID NO:208, SEQ ID NO:209, SEQ ID NO:210, SEQ ID NO:211, SEQ ID NO:212, SEQ ID NO:213, SEQ ID NO:214, SEQ ID NO:215, SEQ ID NO:216, SEQ ID NO:217, SEQ ID NO:218, SEQ ID NO:219, SEQ ID NO:220, SEQ ID NO:221, SEQ ID NO:222, SEQ ID NO:223, SEQ ID NO:224, SEQ ID NO:225, SEQ ID NO:226, SEQ ID NO:227, SEQ ID NO:228, SEQ ID NO:229, SEQ ID NO:230, SEQ ID NO:231, SEQ ID NO:232, SEQ ID NO:233, SEQ ID NO:234, SEQ ID NO:235, SEQ ID NO:236, SEQ ID NO:237, SEQ ID NO:238, SEQ ID NO:239, SEQ ID NO:240, SEQ ID NO:241, and SEQ ID NO:242 will have at least 75% identity (preferably 90%, more preferably at least 95% and most preferably 99-100%) to the sequence of SEQ ID NO:122, SEQ ID NO:123, SEQ ID NO:124, SEQ ID NO:125, SEQ ID NO:126, SEQ ID NO:127, SEQ ID NO:128, SEQ ID NO:129, SEQ ID NO:130, SEQ ID NO:131, SEQ ID NO:132, SEQ ID NO:133, SEQ ID NO:134, SEQ ID NO:135, SEQ ID NO:136, SEQ ID NO:137, SEQ ID NO:138, SEQ ID NO:139, SEQ ID NO:140, SEQ ID NO:141, SEQ ID NO:142, SEQ ID NO:143, SEQ ID NO:144, SEQ ID NO:145, SEQ ID NO:146, SEQ ID NO:147, SEQ ID NO:148, SEQ ID NO:149, SEQ ID NO:150, SEQ ID NO:151, SEQ ID NO:152, SEQ ID NO:153, SEQ ID NO:154, SEQ ID NO:155, SEQ ID NO:156, SEQ ID NO:157, SEQ ID NO:158, SEQ ID NO:159, SEQ ID NO:160, SEQ ID NO:161, SEQ ID NO:162, SEQ ID NO:163, SEQ ID NO:164, SEQ ID NO:165. SEQ ID NO:166, SEQ ID NO:167, SEQ ID NO:168, SEQ ID NO:169, SEQ ID NO:170, SEQ ID NO:171, SEQ ID NO:172, SEQ ID NO:173, SEQ ID NO:174, SEQ ID NO:175, SEQ ID NO:176, SEQ ID NO:177, SEQ ID NO:178, SEQ ID NO:179, SEQ ID NO:180, SEQ ID NO:181, SEQ ID NO:182, SEQ ID NO:183, SEQ ID NO:184, SEQ ID NO:185, SEQ ID NO:186, SEQ ID NO:187, SEQ ID NO:188, SEQ ID NO:189, SEQ ID NO:190, SEQ ID NO:191, SEQ ID NO:199, SEQ ID NO:193, SEQ ID NO:194, SEQ ID NO:195, SEQ ID NO:196, SEQ ID NO:197, SEQ ID NO:198, SEQ ID NO:199, SEQ ID NO:200, SEQ ID NO:201, SEQ ID NO:202, SEQ ID NO:203, SEQ ID NO:204, SEQ ID NO:205, SEQ ID NO:206, SEQ ID NO:207, SEQ ID NO:208, SEQ ID NO:209, SEQ ID NO:210, SEQ ID NO:211, SEQ ID NO:212, SEQ ID NO:213, SEQ ID NO:214, SEQ ID NO:215, SEQ ID NO:216, SEQ ID NO:217, SEQ ID NO:218, SEQ ID NO:219, SEQ ID NO:220, SEQ ID NO:221, SEQ ID NO:222, SEQ ID NO:223, SEQ ID NO:224, SEQ ID NO:225, SEQ ID NO:226, SEQ ID NO:227, SEQ ID NO:228, SEQ ID NO:229, SEQ ID NO:230, SEQ ID NO:231, SEQ ID NO:232, SEQ ID NO:233, SEQ ID NO:234, SEQ ID NO:235, SEQ ID NO:236, SEQ ID NO:237, SEQ ID NO:238, SEQ ID NO:239, SEQ ID NO:240, SEQ ID NO:241, and SEQ ID NO:242, except that it lacks one or more of the domains selected from the group consisting of a N-terminal domain, a catalytic domain, a C-terminal domain, a coiled-coil structure region, a proline-rich region, a spacer region, an insert, and a C-terminal tail; or (i) is the complement of the nucleotide sequence of (h). The domain demarcations of the polypeptides of the invention are indicated in Table 2 by reference to the kinase domain.

[0024] The term “complement” refers to two nucleotides that can form multiple favorable interactions with one another. For example, adenine is complementary to thymine as they can form two hydrogen bonds. Similarly, guanine and cytosine are complementary since they can form three hydrogen bonds. A nucleotide sequence is the complement of another nucleotide sequence if all of the nucleotides of the first sequence are complementary to all of the nucleotides of the second sequence.

[0025] The term “domain” refers to a region of a polypeptide that contains a particular function. For instance, N-terminal or C-terminal domains of signal transduction proteins can serve functions including, but not limited to, binding molecules that localize the signal transduction molecule to different regions of the cell or binding other signaling molecules directly responsible for propagating a particular cellular signal. Some domains can be expressed separately from the rest of the protein and function by themselves, while others must remain part of the intact protein to retain function. The latter are termed functional regions of proteins and also relate to domains.

[0026] The term “N-terminal domain” refers to the extracatalytic region located between the initiator methionine and the catalytic domain of the protein kinase. The N-terminal domain can be identified following a Smith-Waterman alignment of the protein sequence against the non-redundant protein database to define the N-terminal boundary of the catalytic domain. Depending on its length, the N-terminal domain may or may not play a regulatory role in kinase function. An example of a protein kinase whose N-terminal domain has been shown to play a regulatory role is PAK65, which contains a CRIB motif used for Cdc42 and rac binding (Burbelo, P. D. et al. (1995) J. Biol. Chem. 270, 29071-29074). The N-terminal domain of a protein kinase of the invention is that portion of the protein kinase to the amino-terminal side of the kinase domain where the kinase domain is identified in Table 2, herein. Further, in some cases, portions of the N-terminal domains of the protein kinases of the invention have not been identified since the entire sequence is not available. However, with the methods described herein, the full-length sequences of the kinases of the invention can be determined and using the approaches described herein the N-terminal domain can be identified.

[0027] The term “catalytic domain” or “kinase domain” refers to a region of the protein kinase that is typically 25-300 amino acids long and is responsible for carrying out the phosphate transfer reaction from a high-energy phosphate donor molecule such as ATP or GTP to itself (autophosphorylation) or to other proteins (exogenous phosphorylation). The catalytic domain of protein kinases is made up of 12 subdomains that contain highly conserved amino acid residues, and are responsible for proper polypeptide folding and for catalysis. The catalytic domain can be identified following a Smith-Waterman alignment of the protein sequence against the non-redundant protein database. The catalytic/kinase domains of the protein kinases of the invention are identified in Table 2, herein. Further, in some cases, the complete sequence of the catalytic/kinase domains of the protein kinases of the invention may not have been provided since the entire sequence is not available. However, with the methods described herein, the full-length sequences of the kinases of the invention can be determined, and using the approaches described herein, the catalytic/kinase domain can be identified.

[0028] The term “catalytic activity”, as used herein, defines the rate at which a kinase catalytic domain phosphorylates a substrate. Catalytic activity can be measured, for example, by determining the amount of a substrate converted to a phosphorylated product as a function of time. Catalytic activity can be measured by methods of the invention by holding time constant and determining the concentration of a phosphorylated substrate after a fixed period of time. Phosphorylation of a substrate occurs at the active-site of a protein kinase. The active-site is normally a cavity in which the substrate binds to the protein kinase and is phosphorylated.

[0029] The term “substrate” as used herein refers to a molecule phosphorylated by a kinase of the invention. Kinases phosphorylate substrates on serine/threonine or tyrosine amino acids. The molecule may be another protein or a polypeptide.

[0030] The term “C-terminal domain” refers to the region located between the catalytic domain and the carboxy-terminal amino acid residue of the protein kinase. The C-terminal domain can be identified by using a Smith-Waterman alignment of the protein sequence against the non-redundant protein database to define the C-terminal boundary of the catalytic domain or of any functional C-terminal extracatalytic domain. Depending on its length and amino acid composition, the C-terminal domain may or may not play a regulatory role in kinase function. An example of a protein kinase whose C-terminal domain may play a regulatory role is PAK3 which contains a heterotrimeric G_{b} subunit-binding site near its C-terminus (Leeuw, T. el al. (1998) Nature, 391, 191-195). The C-terminal domain of a protein kinase of the invention is that portion of the protein kinase to the carboxy-terminal side of the kinase domain where the kinase domain is identified in Table 2, herein. In some cases, the C-terminal domains of the protein kinases of the invention have not been provided since the entire sequence is not available. However, with the methods described herein, the full-length sequences of the kinases of the invention can be determined, and using the approaches described herein, the C-terminal domain can be identified.

[0031] The term “signal transduction pathway” refers to the molecules that propagate an extracellular signal through the cell membrane to become an intracellular signal. This signal can then stimulate a cellular response. The polypeptide molecules involved in signal transduction processes are typically receptor and non-receptor protein tyrosine kinases, receptor and non-receptor protein phosphatases, SRC homology 2 and 3 domains, phosphotyrosine binding proteins (SRC homology 2 (SH2) and phosphotyrosine binding (PTB and PH) domain containing proteins), proline-rich binding proteins (SH3 domain containing proteins), nucleotide exchange factors, and transcription factors.

[0032] The term “coiled-coil structure region” as used herein, refers to a polypeptide sequence that has a high probability of adopting a coiled-coil structure as predicted by computer algorithms such as COILS (Lupas, A. (1996) Meth. Enzymology 266:513-525). Coiled-coils are formed by two or three amphipathic α-helices in parallel. Coiled-coils can bind to coiled-coil domains of other polypeptides resulting in homo- or heterodimers (Lupas, A. (1991) Science 252:1162-1164). Coiled-coil-dependent oligomerization has been shown to be necessary for protein function including catalytic activity of serine/threonine kinases (Roe, J. et al. (1997) J. Biol. Chem. 272:5838-5845). Coiled-coil regions in the proteins of the invention can be identified using these methods. They may be present as sub-domains of the N-terminal, kinase, or C-terminal domains of the polypeptides of the invention.

[0033] The term “proline-rich region” as used herein, refers to a region of a protein kinase whose proline content over a given amino acid length is higher than the average content of this amino acid found in proteins (i.e., >10%). Proline-rich regions are easily discernable by visual inspection of amino acid sequences and quantitated by standard computer sequence analysis programs such as the DNAStar program EditSeq. Proline-rich regions have been demonstrated to participate in regulatory protein -protein interactions. Among these interactions, those that are most relevant to this invention involve the “PxxP” proline rich motif found in certain protein kinases (i.e., human PAK1) and the SH3 domain of the adaptor molecule Nck (Galisteo, M. L. et al. (1996) J. Biol. Chem. 271:20997-21000). Other regulatory interactions involving “PxxP” proline-rich motifs include the WW domain (Sudol, M. (1996) Prog. Biophys. Mol. Bio. 65:113-132). Proline rich regions in the proteins of the invention can be identified using these methods. They may be present as sub-domains of the N-terminal, kinase, or C-terminal domains of the polypeptides of the invention.

[0034] The term “spacer region” as used herein, refers to a region of the protein kinase located between predicted functional domains. The spacer region has no detectable homology to any amino acid sequence in the database, and can be identified by using a Smith-Waterman alignment of the protein sequence against the non-redundant protein database to define the C— and N-terminal boundaries of the flanking functional domains. Spacer regions may or may not play a fundamental role in protein kinase function. Precedence for the regulatory role of spacer regions in kinase function is provided by the role of the src kinase spacer in inter-domain interactions (Xu, W. et al. (1997) Nature 385:595-602). Spacer regions in the proteins of the invention can be identified using these methods. They may be present as sub-domains of the N-terminal, kinase, or C-terminal domains of the polypeptides of the invention.

[0035] The term “insert” as used herein refers to a portion of a protein kinase that is absent from a close homolog. Inserts may or may not by the product alternative splicing of exons. Inserts can be identified by using a Smith-Waterman sequence alignment of the protein sequence against the non-redundant protein database, or by means of a multiple sequence alignment of homologous sequences using the DNAStar program Megalign. Inserts may play a functional role by presenting a new interface for protein-protein interactions, or by interfering with such interactions. Insert regions in the proteins of the invention can be identified using these methods. They may be present as sub-domains of the N-terminal, kinase, or C-terminal domains of the polypeptides of the invention.

[0036] The term “C-terminal tail” as used herein, refers to a C-terminal domain of a protein kinase, that by homology extends or protrudes past the C-terminal amino acid of its closest homolog. C-terminal tails can be identified by using a Smith-Waterman sequence alignment of the protein sequence against the non-redundant protein database, or by means of a multiple sequence alignment of homologous sequences using the DNAStar program Megalign. Depending on its length, a C-terminal tail may or may not play a regulatory role in kinase function. C-terminal tail regions in the proteins of the invention can be identified using these methods. They may be present as sub-domains of the N-terminal, kinase, or C-terminal domains of the polypeptides of the invention.

[0037] Various low or high stringency hybridization conditions may be used depending upon the specificity and selectivity desired. These conditions are well-known to those skilled in the art. Under stringent hybridization conditions only highly complementary nucleic acid sequences hybridize. Preferably, such conditions prevent hybridization of nucleic acids having more than 1 or 2 mismatches out of 20 contiguous nucleotides, more preferably, such conditions prevent hybridization of nucleic acids having more than 1 or 2 mismatches out of 50 contiguous nucleotides, most preferably, such conditions prevent hybridization of nucleic acids having more than 1 or 2 mismatches out of 100 contiguous nucleotides. In some instances, the conditions may prevent hybridization of nucleic acids having more than 5 mismatches in the fall-length sequence.

[0038] By stringent hybridization assay conditions is meant hybridization assay conditions at least as stringent as the following: hybridization in 50% formamide, 5×SSC, 50 mM NaH₂PO₄, pH 6.8, 0.5% SDS, 0.1 mg/mL sonicated salmon sperm DNA, and 5× Denhart solution at 42° C. overnight; washing with 2×SSC, 0.1% SDS at 45° C.; and washing with 0.2×SSC, 0. 1% SDS at 45° C. Under some of the most stringent hybridization assay conditions, the second wash can be done with 0.1×SSC at a temperature up to 70° C. (pg. 421, Berger et al. (1987) Guide to Molecular Cloning Techniques, Meth. Enzym. vol. 152, hereby incorporated by reference herein including any figures, tables, or drawings.). However, other applications may require the use of conditions falling between these sets of conditions. Methods of determining the conditions required to achieve desired hybridizations are well-known to those with ordinary skill in the art, and are based on several factors, including but not limited to, the sequences to be hybridized and the samples to be tested.

[0039] In other preferred embodiments, the invention features isolated, enriched, or purified nucleic acid molecules encoding kinase polypeptides, further comprising a vector or promoter effective to initiate transcription in a host cell. The invention also features recombinant nucleic acid, preferably in a cell or an organism. The recombinant nucleic acid may contain a sequence selected from the group consisting of those set forth in SEQ ID NO:1, SEQ ID NO:2, SEQ ID NO:3, SEQ ID NO:4, SEQ ID NO:5, SEQ ID NO:6, SEQ ID NO:7, SEQ ID NO:8, SEQ ID NO:9, SEQ ID NO:10, SEQ ID NO:1, SEQ ID NO:12, SEQ ID NO:13, SEQ ID NO:14, SEQ ID NO:15, SEQ ID NO:16, SEQ ID NO:17, SEQ ID NO:18, SEQ ID NO:19, SEQ ID NO:20, SEQ ID NO:21, SEQ ID NO:22, SEQ ID NO:23, SEQ ID NO:24, SEQ ID NO:25, SEQ ID NO:26, SEQ ID NO:27, SEQ ID NO:28, SEQ ID NO:29, SEQ ID NO:30, SEQ ID NO:31, SEQ ID NO:32, SEQ ID NO:33, SEQ ID NO:34, SEQ ID NO:35, SEQ ID NO:36, SEQ ID NO:37, SEQ ID NO:38, SEQ ID NO:39, SEQ ID NO:40, SEQ ID NO:41, SEQ ID NO:42, SEQ ID NO:43, SEQ ID NO:44, SEQ ID NO:45, SEQ ID NO:46, SEQ ID NO:47, SEQ ID NO:48, SEQ ID NO:49, SEQ ID NO:50, SEQ ID NO:51, SEQ ID NO:52, SEQ ID NO:53, SEQ ID NO:54, SEQ ID NO:55, SEQ ID NO:56, SEQ ID NO:57, SEQ ID NO:58, SEQ ID NO:59, SEQ ID NO:60, SEQ ID NO:61, SEQ ID NO:62, SEQ ID NO:63, SEQ ID NO:64, SEQ ID NO:65, SEQ ID NO:66, SEQ ID NO:67, SEQ ID NO:68, SEQ ID NO:69, SEQ ID NO:70, SEQ ID NO:71, SEQ ID NO:72, SEQ ID NO:73, SEQ ID NO:74, SEQ ID NO:75, SEQ ID NO:76, SEQ ID NO:77, SEQ ID NO:78, SEQ ID NO:79, SEQ ID NO:80, SEQ ID NO:81, SEQ ID NO:82, SEQ ID NO:83, SEQ ID NO:84, SEQ ID NO:85, SEQ ID NO:86, SEQ ID NO:87, SEQ ID NO:88, SEQ ID NO:89, SEQ ID NO:90, SEQ ID NO:91, SEQ ID NO:92, SEQ ID NO:93, SEQ ID NO:94, SEQ ID NO:95, SEQ ID NO:96, SEQ ID NO:97, SEQ ID NO:98, SEQ ID NO:99, SEQ ID NO:100, SEQ ID NO:101, SEQ ID NO:102, SEQ ID NO:103, SEQ ID NO:104, SEQ ID NO:105, SEQ ID NO:106, SEQ ID NO:107, SEQ ID NO:108, SEQ ID NO:109, SEQ ID NO:110, SEQ ID NO:111, SEQ ID NO:112, SEQ ID NO:113, SEQ ID NO:114, SEQ ID NO:115, SEQ ID NO:116, SEQ ID NO:117, SEQ ID NO:118, SEQ ID NO:119, SEQ ID NO:120, and SEQ ID NO:121, or a functional derivative thereof and a vector or a promoter effective to initiate transcription in a host cell. The recombinant nucleic acid can alternatively contain a transcriptional initiation region functional in a cell, a sequence complementary to an RNA sequence encoding a kinase polypeptide and a transcriptional termination region functional in a cell. Specific vectors and host cell combinations are discussed herein. The recombinant nucleic acid can also contain the full-length sequence encoding the protein kinase, or a domain, for example.

[0040] The term “vector” relates to a single or double-stranded circular nucleic acid molecule that can be transfected into cells and replicated within or independently of a cell genome. A circular double-stranded nucleic acid molecule can be cut and thereby linearized upon treatment with restriction enzymes. An assortment of nucleic acid vectors, restriction enzymes, and the knowledge of the nucleotide sequences cut by restriction enzymes are readily available to those skilled in the art. A nucleic acid molecule encoding a kinase can be inserted into a vector by cutting the vector with restriction enzymes and ligating the two pieces together.

[0041] The term “transfecting” defines a number of methods to insert a nucleic acid vector or other nucleic acid molecules into a cellular organism. These methods involve a variety of techniques, such as treating the cells with high concentrations of salt, an electric field, detergent, or DMSO to render the outer membrane or wall of the cells permeable to nucleic acid molecules of interest or use of various viral transduction strategies.

[0042] The term “promoter” as used herein, refers to nucleic acid sequence needed for gene sequence expression. Promoter regions vary from organism to organism, but are well known to persons skilled in the art for different organisms. For example, in prokaryotes, the promoter region contains both the promoter (which directs the initiation of RNA transcription) as well as the DNA sequences which, when transcribed into RNA, will signal synthesis initiation. Such regions will normally include those 5′-non-coding sequences involved with initiation of transcription and translation, such as the TATA box, capping sequence, CAAT sequence, and the like.

[0043] In preferred embodiments, the isolated nucleic acid comprises, consists essentially of, or consists of a nucleic acid sequence set forth in SEQ ID NO:1, SEQ ID NO:2, SEQ ID NO:3, SEQ ID NO:4, SEQ ID NO:5, SEQ ID NO:6, SEQ ID NO:7, SEQ ID NO:8, SEQ ID NO:9, SEQ ID NO:10, SEQ ID NO:11, SEQ ID NO:12, SEQ ID NO:13, SEQ ID NO:14, SEQ ID NO:15, SEQ ID NO:16, SEQ ID NO:17, SEQ ID NO:18, SEQ ID NO:19, SEQ ID NO:20, SEQ ID NO:21, SEQ ID NO:22, SEQ ID NO:23, SEQ ID NO:24, SEQ ID NO:25, SEQ ID NO:26, SEQ ID NO:27, SEQ ID NO:28, SEQ ID NO:29, SEQ ID NO:30, SEQ ID NO:31, SEQ ID NO:32, SEQ ID NO:33, SEQ ID NO:34, SEQ ID NO:35, SEQ ID NO:36, SEQ ID NO:37, SEQ ID NO:38, SEQ ID NO:39, SEQ ID NO:40, SEQ ID NO:41, SEQ ID NO:42, SEQ ID NO:43, SEQ ID NO:44, SEQ ID NO:45, SEQ ID NO:46, SEQ ID NO:47, SEQ ID NO:48, SEQ ID NO:49, SEQ ID NO:50, SEQ ID NO:51, SEQ ID NO:52, SEQ ID NO:53, SEQ ID NO:54, SEQ ID NO:55, SEQ ID NO:56, SEQ ID NO:57, SEQ ID NO:58, SEQ ID NO:59, SEQ ID NO:60, SEQ ID NO:61, SEQ ID NO:62, SEQ ID NO:63, SEQ ID NO:64, SEQ ID NO:65, SEQ ID NO:66, SEQ ID NO:67, SEQ ID NO:68, SEQ ID NO:69, SEQ ID NO:70, SEQ ID NO:71, SEQ ID NO:72, SEQ ID NO:73, SEQ ID NO:74, SEQ ID NO:75, SEQ ID NO:76, SEQ ID NO:77, SEQ ID NO:78, SEQ ID NO:79, SEQ ID NO:80, SEQ ID NO:81, SEQ ID NO:82, SEQ ID NO:83, SEQ ID NO:84, SEQ ID NO:85, SEQ ID NO:86, SEQ ID NO:87, SEQ ID NO:88, SEQ ID NO:89, SEQ ID NO:90, SEQ ID NO:91, SEQ ID NO:92, SEQ ID NO:93, SEQ ID NO:94, SEQ ID NO:95, SEQ ID NO:96, SEQ ID NO:97, SEQ ID NO:98, SEQ ID NO:99, SEQ ID NO:100, SEQ ID NO:101, SEQ ID NO:102, SEQ ID NO:103, SEQ ID NO:104, SEQ ID NO:105, SEQ ID NO:106, SEQ ID NO:107, SEQ ID NO:108, SEQ ID NO:109, SEQ ID NO:110, SEQ ID NO:111, SEQ ID NO:112, SEQ ID NO:113, SEQ ID NO:114, SEQ ID NO:115, SEQ ID NO:116, SEQ ID NO:117, SEQ ID NO:118, SEQ ID NO:119, SEQ ID NO:120, and SEQ ID NO:121, or the corresponding full-length sequence, encodes an amino acid sequence selected from the group consisting of those set forth in SEQ ID NO:122, SEQ ID NO:123, SEQ ID NO:124, SEQ ID NO:125, SEQ ID NO:126, SEQ ID NO:127, SEQ ID NO:128, SEQ ID NO:129, SEQ ID NO:130, SEQ ID NO:131, SEQ ID NO:132, SEQ ID NO:133, SEQ ID NO:134, SEQ ID NO:135, SEQ ID NO:136, SEQ ID NO:137, SEQ ID NO:138, SEQ ID NO:139, SEQ ID NO:140, SEQ ID NO:141, SEQ ID NO:142, SEQ ID NO:143, SEQ ID NO:144, SEQ ID NO:145, SEQ ID NO:146, SEQ ID NO:147, SEQ ID NO:148, SEQ ID NO:149, SEQ ID NO:150, SEQ ID NO:151, SEQ ID NO:152, SEQ ID NO:153, SEQ ID NO:154, SEQ ID NO:155, SEQ ID NO:156, SEQ ID NO:157, SEQ ID NO:158, SEQ ID NO:159, SEQ ID NO:160, SEQ ID NO:161, SEQ ID NO:162, SEQ ID NO:163, SEQ ID NO:164, SEQ ID NO:165. SEQ ID NO:166, SEQ ID NO:167, SEQ ID NO:168, SEQ ID NO:169, SEQ ID NO:170, SEQ ID NO:171, SEQ ID NO:172, SEQ ID NO:173, SEQ ID NO:174, SEQ ID NO:175, SEQ ID NO:176, SEQ ID NO:177, SEQ ID NO:178, SEQ ID NO:179, SEQ ID NO:180, SEQ ID NO:181, SEQ ID NO:182, SEQ ID NO:183, SEQ ID NO:184, SEQ ID NO:185, SEQ ID NO:186, SEQ ID NO:187, SEQ ID NO:188, SEQ ID NO:189, SEQ ID NO:190, SEQ ID NO:191, SEQ ID NO:199, SEQ ID NO:193, SEQ ID NO:194, SEQ ID NO:195, SEQ ID NO:196, SEQ ID NO:197, SEQ ID NO:198, SEQ ID NO:199, SEQ ID NO:200, SEQ ID NO:201, SEQ ID NO:202, SEQ ID NO:203, SEQ ID NO:204, SEQ ID NO:205, SEQ ID NO:206, SEQ ID NO:207, SEQ ID NO:208, SEQ ID NO:209, SEQ ID NO:210, SEQ ID NO:211, SEQ ID NO:212, SEQ ID NO:213, SEQ ID NO:214, SEQ ID NO:215, SEQ ID NO:216, SEQ ID NO:217, SEQ ID NO:218, SEQ ID NO:219, SEQ ID NO:220, SEQ ID NO:221, SEQ ID NO:222, SEQ ID NO:223, SEQ ID NO:224, SEQ ID NO:225, SEQ ID NO:226, SEQ ID NO:227, SEQ ID NO:228, SEQ ID NO:229, SEQ ID NO:230, SEQ ID NO:231, SEQ ID NO:232, SEQ ID NO:233, SEQ ID NO:234, SEQ ID NO:235, SEQ ID NO:236, SEQ ID NO:237, SEQ ID NO:238, SEQ ID NO:239, SEQ ID NO:240, SEQ 1ID NO:241, and SEQ ID NO:242, or the corresponding full-length amino acid sequence, a functional derivative thereof, or at least 10, 20, 40, 50, 75, 100, 200, 300 or 500 contiguous amino acids of a sequence selected from the group consisting of those set forth in SEQ ID NO:122, SEQ ID NO:123, SEQ ID NO:124, SEQ ID NO:125, SEQ ID NO:126, SEQ ID NO:127, SEQ ID NO:128, SEQ ID NO:129, SEQ ID NO:130, SEQ ID NO:131, SEQ ID NO:132, SEQ ID NO:133, SEQ ID NO:134, SEQ ID NO:135, SEQ ID NO:136, SEQ ID NO:137, SEQ ID NO:138, SEQ ID NO:139, SEQ ID NO:140, SEQ ID NO:141, SEQ ID NO:142, SEQ ID NO:143, SEQ ID NO:144, SEQ ID NO:145, SEQ ID NO:146, SEQ ID NO:147, SEQ ID NO:148, SEQ ID NO:149, SEQ ID NO:150, SEQ ID NO:151, SEQ ID NO:152, SEQ ID NO:153, SEQ ID NO:154, SEQ ID NO:155, SEQ ID NO:156, SEQ ID NO:157, SEQ ID NO:158, SEQ ID NO:159, SEQ ID NO:160, SEQ ID NO:161, SEQ ID NO:162, SEQ ID NO:163, SEQ ID NO:164, SEQ ID NO:165. SEQ ID NO:166, SEQ ID NO:167, SEQ ID NO:168, SEQ ID NO:169, SEQ ID NO:170, SEQ ID NO:171, SEQ ID NO:172, SEQ ID NO:173, SEQ ID NO:174, SEQ ID NO:175, SEQ ID NO:176, SEQ ID NO:177, SEQ ID NO:178, SEQ ID NO:179, SEQ ID NO:180, SEQ ID NO:181, SEQ ID NO:182, SEQ ID NO:183, SEQ ID NO:184, SEQ ID NO:185, SEQ ID NO:186, SEQ ID NO:187, SEQ ID NO:188, SEQ ID NO:189, SEQ ID NO:190, SEQ ID NO:191, SEQ ID NO:199, SEQ ID NO:193, SEQ ID NO:194, SEQ ID NO:195, SEQ ID NO:196, SEQ ID NO:197, SEQ ID NO:198, SEQ ID NO:199, SEQ ID NO:200, SEQ ID NO:201, SEQ ID NO:202, SEQ ID NO:203, SEQ ID NO:204, SEQ ID NO:205, SEQ ID NO:206, SEQ ID NO:207, SEQ ID NO:208, SEQ ID NO:209, SEQ ID NO:210, SEQ ID NO:211, SEQ ID NO:212, SEQ ID NO:213, SEQ ID NO:214, SEQ ID NO:215, SEQ ID NO:216, SEQ ID NO:217, SEQ ID NO:218, SEQ ID NO:219, SEQ ID NO:220, SEQ ID NO:221, SEQ ID NO:222, SEQ ID NO:223, SEQ ID NO:224, SEQ ID NO:225, SEQ ID NO:226, SEQ ID NO:227, SEQ ID NO:228, SEQ ID NO:229, SEQ ID NO:230, SEQ ID NO:231, SEQ ID NO:232, SEQ ID NO:233, SEQ ID NO:234, SEQ ID NO:235, SEQ ID NO:236, SEQ ID NO:237, SEQ ID NO:238, SEQ ID NO:239, SEQ ID NO:240, SEQ ID NO:241, and SEQ ID NO:242, or the corresponding full-length sequences or derivatives thereof. The nucleic acid may be isolated from a natural source by cDNA cloning or by subtractive hybridization. The natural source may be mammalian, preferably human, blood, semen, or tissue, and the nucleic acid may be synthesized by the triester method or by using an automated DNA synthesizer.

[0044] The term “mammal” refers preferably to such organisms as mice, rats, rabbits, guinea pigs, sheep, and goats, more preferably to cats, dogs, monkeys, and apes, and most preferably to humans.

[0045] In yet other preferred embodiments, the nucleic acid is a conserved or unique region, for example those useful for: the design of hybridization probes to facilitate identification and cloning of additional polypeptides, the design of PCR probes to facilitate cloning of additional polypeptides, obtaining antibodies to polypeptide regions, and designing antisense oligonucleotides.

[0046] By “conserved nucleic acid regions”, are meant regions present on two or more nucleic acids encoding a kinase polypeptide, to which a particular nucleic acid sequence can hybridize under lower stringency conditions. Examples of lower stringency conditions suitable for screening for nucleic acid encoding kinase polypeptides are provided in Berger et al. (1987) Guide to Molecular Cloning Techniques, Meth. Enzym. vol. 152, hereby incorporated by reference herein in its entirety, including any drawings, figures, or tables. Preferably, conserved regions differ by no more than 5 out of 20 nucleotides, even more preferably 2 out of 20 nucleotides or most preferably 1 out of 20 nucleotides.

[0047] By “unique nucleic acid region” is meant a sequence present in a nucleic acid coding for a kinase polypeptide that is not present in a sequence coding for any other naturally occurring polypeptide. Such regions preferably encode 10 (preferably 25, more preferably 50, most preferably 75) or more contiguous amino acids selected from the group consisting of those set forth in SEQ ID NO:122, SEQ ID NO:123, SEQ ID NO:124, SEQ ID NO:140, SEQ ID NO:141, SEQ ID NO:142, SEQ ID NO:143, SEQ ID NO:144, SEQ ID NO:145, SEQ ID NO:146, SEQ ID NO:147, SEQ ID NO:148, SEQ ID NO:149, SEQ ID NO:150, SEQ ID NO:151, SEQ ID NO:152, SEQ ID NO:153, SEQ ID NO:154, SEQ ID NO:155, SEQ ID NO:156, SEQ ID NO:157, SEQ ID NO:158, SEQ ID NO:159, SEQ ID NO:160, SEQ ID NO:161, SEQ ID NO:162, SEQ ID NO:163, SEQ ID NO:164, SEQ ID NO:165. SEQ ID NO:166, SEQ ID NO:167, SEQ ID NO:168, SEQ ID NO:169, SEQ ID NO:170, SEQ ID NO:171, SEQ ID NO:172, SEQ ID NO:173, SEQ ID NO:174, SEQ ID NO:175, SEQ ID NO:176, SEQ ID NO:177, SEQ ID NO:178, SEQ ID NO:179, SEQ ID NO:180, SEQ ID NO:181, SEQ ID NO:182, SEQ ID NO:183, SEQ ID NO:184, SEQ ID NO:185, SEQ ID NO:186, SEQ ID NO:187, SEQ ID NO:188, SEQ ID NO:189, SEQ ID NO:190, SEQ ID NO:191, SEQ ID NO:199, SEQ ID NO:193, SEQ ID NO:194, SEQ ID NO:195, SEQ ID NO:196, SEQ ID NO:197, SEQ ID NO:198, SEQ ID NO:199, SEQ ID NO:200, SEQ ID NO:201, SEQ ID NO:202, SEQ ID NO:203, SEQ ID NO:204, SEQ ID NO:205, SEQ ID NO:206, SEQ ID NO:207, SEQ ID NO:208, SEQ ID NO:209, SEQ ID NO:210, SEQ ID NO:211, SEQ ID NO:212, SEQ ID NO:213, SEQ ID NO:214, SEQ ID NO:215, SEQ ID NO:216, SEQ ID NO:217, SEQ ID NO:218, SEQ ID NO:219, SEQ ID NO:220, SEQ ID NO:221, SEQ ID NO:222, SEQ ID NO:223, SEQ ID NO:224, SEQ ID NO:225, SEQ ID NO:226, SEQ ID NO:227, SEQ ID NO:228, SEQ ID NO:229, SEQ ID NO:230, SEQ ID NO:231, SEQ ID NO:232, SEQ ID NO:233, SEQ ID NO:234, SEQ ID NO:235, SEQ ID NO:236, SEQ ID NO:237, SEQ ID NO:238, SEQ ID NO:239, SEQ ID NO:240, SEQ ID NO:241, and SEQ ID NO:242. Preferably, the nucleic acid probe encodes a kinase polypeptide that is a fragment of the protein encoded by an amino acid sequence selected from the group consisting of those set forth in SEQ ID NO:122, SEQ ID NO:123, SEQ ID NO:124, SEQ ID NO:125, SEQ ID NO:126, SEQ ID NO:127, SEQ ID NO:128, SEQ ID NO:129, SEQ ID NO:130, SEQ ID NO:131, SEQ ID NO:132, SEQ ID NO:133, SEQ ID NO:134, SEQ ID NO:135, SEQ ID NO:136, SEQ ID NO:137, SEQ ID NO:138, SEQ ID NO:139, SEQ ID NO:140, SEQ ID NO:141, SEQ ID NO:142, SEQ ID NO:143, SEQ ID NO:144, SEQ ID NO:145, SEQ ID NO:146, SEQ ID NO:147, SEQ ID NO:148, SEQ ID NO:149, SEQ ID NO:150, SEQ ID NO:151, SEQ ID NO:152, SEQ ID NO:153, SEQ ID NO:154, SEQ ID NO:155, SEQ ID NO:156, SEQ ID NO:157, SEQ ID NO:158, SEQ ID NO:159, SEQ ID NO:160, SEQ ID NO:161, SEQ ID NO:162, SEQ ID NO:163, SEQ ID NO:164, SEQ ID NO:165. SEQ ID NO:166, SEQ ID NO:167, SEQ ID NO:168, SEQ ID NO:169, SEQ ID NO:170, SEQ ID NO:171, SEQ ID NO:172, SEQ ID NO:173, SEQ ID NO:174, SEQ ID NO:175, SEQ ID NO:176, SEQ ID NO:177, SEQ ID NO:178, SEQ ID NO:179, SEQ ID NO:180, SEQ ID NO:181, SEQ ID NO:182, SEQ ID NO:183, SEQ ID NO:184, SEQ ID NO:185, SEQ ID NO:186, SEQ ID NO:187, SEQ ID NO:188, SEQ ID NO:189, SEQ ID NO:190, SEQ ID NO:191, SEQ ID NO:199, SEQ ID NO:193, SEQ ID NO:194, SEQ ID NO:195, SEQ ID NO:196, SEQ ID NO:197, SEQ ID NO:198, SEQ ID NO:199, SEQ ID NO:200, SEQ ID NO:201, SEQ ID NO:202, SEQ ID NO:203, SEQ ID NO:204, SEQ ID NO:205, SEQ ID NO:206, SEQ ID NO:207, SEQ ID NO:208, SEQ ID NO:209, SEQ ID NO:210, SEQ ID NO:211, SEQ ID NO:212, SEQ ID NO:213, SEQ ID NO:214, SEQ ID NO:215, SEQ ID NO:216, SEQ ID NO:217, SEQ ID NO:218, SEQ ID NO:219, SEQ ID NO:220, SEQ ID NO:221, SEQ ID NO:222, SEQ ID NO:223, SEQ ID NO:224, SEQ ID NO:225, SEQ ID NO:226, SEQ ID NO:227, SEQ ID NO:228, SEQ ID NO:229, SEQ ID NO:230, SEQ ID NO:231, SEQ ID NO:232, SEQ ID NO:233, SEQ ID NO:234, SEQ ID NO:235, SEQ ID NO:236, SEQ ID NO:237, SEQ ID NO:238, SEQ ID NO:239, SEQ ID NO:240, SEQ ID NO:241, and SEQ ID NO:242, or the corresponding full-length amino acid sequences. The nucleic acid probe contains a nucleotide base sequence that will hybridize to a sequence selected from the group consisting of those set forth in SEQ ID NO:1, SEQ ID NO:2, SEQ ID NO:3, SEQ ID NO:4, SEQ ID NO:5, SEQ ID NO:6, SEQ ID NO:7, SEQ ID NO:8, SEQ ID NO:9, SEQ ID NO:10, SEQ ID NO:1, SEQ ID NO:12, SEQ ID NO:13, SEQ ID NO:14, SEQ ID NO:15, SEQ ID NO:16, SEQ ID NO:17, SEQ ID NO:18, SEQ ID NO:19, SEQ ID NO:20, SEQ ID NO:21, SEQ ID NO:22, SEQ ID NO:23, SEQ ID NO:24, SEQ ID NO:25, SEQ ID NO:26, SEQ ID NO:27, SEQ ID NO:28, SEQ ID NO:29, SEQ ID NO:30, SEQ ID NO:31, SEQ ID NO:32, SEQ ID NO:33, SEQ ID NO:34, SEQ ID NO:35, SEQ ID NO:36, SEQ ID NO:37, SEQ ID NO:38, SEQ ID NO:39, SEQ ID NO:40, SEQ ID NO:41, SEQ ID NO:42, SEQ ID NO:43, SEQ ID NO:44, SEQ ID NO:45, SEQ ID NO:46, SEQ ID NO:47, SEQ ID NO:48, SEQ ID NO:49, SEQ ID NO:50, SEQ ID NO:51, SEQ ID NO:52, SEQ ID NO:53, SEQ ID NO:54, SEQ ID NO:55, SEQ ID NO:56, SEQ ID NO:57, SEQ ID NO:58, SEQ ID NO:59, SEQ ID NO:60, SEQ ID NO:61, SEQ ID NO:62, SEQ ID NO:63, SEQ ID NO:64, SEQ ID NO:65, SEQ ID NO:66, SEQ ID NO:67, SEQ ID NO:68, SEQ ID NO:69, SEQ ID NO:70, SEQ ID NO:71, SEQ ID NO:72, SEQ ID NO:73, SEQ ID NO:74, SEQ ID NO:75, SEQ ID NO:76, SEQ ID NO:77, SEQ ID NO:78, SEQ ID NO:79, SEQ ID NO:80, SEQ ID NO:81, SEQ ID NO:82, SEQ ID NO:83, SEQ ID NO:84, SEQ ID NO:85, SEQ ID NO:86, SEQ ID NO:87, SEQ ID NO:88, SEQ ID NO:89, SEQ ID NO:90, SEQ D) NO:91, SEQ ID NO:92, SEQ ID NO:93, SEQ ID NO:94, SEQ ID NO:95, SEQ ID NO:96, SEQ ID NO:97, SEQ ID NO:98, SEQ ID NO:99, SEQ ID NO:100, SEQ ID NO:101, SEQ ID NO:102, SEQ ID NO:103, SEQ ID NO:104, SEQ ID NO:105, SEQ ID NO:106, SEQ ID NO:107, SEQ ID NO:108, SEQ ID NO:109, SEQ ID NO:110, SEQ ID NO:111, SEQ ID NO:112, SEQ ID NO:113, SEQ ID NO:114, SEQ ID NO:115, SEQ ID NO:116, SEQ ID NO:117, SEQ ID NO:118, SEQ ID NO:119, SEQ ID NO:120, and SEQ ID NO:121, or the corresponding full-length sequence, or a functional derivative thereof

[0048] In preferred embodiments, the nucleic acid probe hybridizes to nucleic acid encoding at least 6, 12, 75, 90, 105, 120, 150, 200, 250, 300 or 350 contiguous amino acids of a sequence selected from the group consisting of those set forth in SEQ ID NO:122, SEQ ID NO:123, SEQ ID NO:124, SEQ ID NO:125, SEQ ID NO:126, SEQ ID NO:127, SEQ ID NO:128, SEQ ID NO:129, SEQ ID NO:130, SEQ ID NO:131, SEQ ID NO:132, SEQ ID NO:133, SEQ ID NO:134, SEQ ID NO:135, SEQ ID NO:136, SEQ ID NO:137,.SEQ ID NO:138, SEQ ID NO:139, SEQ ID NO:140, SEQ ID NO:141, SEQ ID NO:142, SEQ ID NO:143, SEQ ID NO:144, SEQ ID NO:145, SEQ ID NO:146, SEQ ID NO:147, SEQ ID NO:148, SEQ ID NO:149, SEQ ID NO:150, SEQ ID NO:151, SEQ ID NO:152, SEQ ID NO:153, SEQ ID NO:154, SEQ ID NO:155, SEQ ID NO:156, SEQ ID NO:157, SEQ ID NO:158, SEQ ID NO:159, SEQ ID NO:160, SEQ ID NO:161, SEQ ID NO:162, SEQ ID NO:163, SEQ ID NO:164, SEQ ID NO:165. SEQ ID NO:166, SEQ ID NO:167, SEQ ID NO:168, SEQ ID NO:169, SEQ ID NO:170, SEQ ID NO:171, SEQ ID NO:172, SEQ ID NO:173, SEQ ID NO:174, SEQ ID NO:175, SEQ ID NO:176, SEQ ID NO:177, SEQ ID NO:178, SEQ ID NO:179, SEQ ID NO:180, SEQ ID NO:181, SEQ ID NO:182, SEQ ID NO:183, SEQ ID NO:184, SEQ ID NO:185, SEQ ID NO:186, SEQ ID NO:187, SEQ ID NO:188, SEQ ID NO:189, SEQ ID NO:190, SEQ ID NO:191, SEQ ID NO:199, SEQ ID NO:193, SEQ ID NO:194, SEQ ID NO:195, SEQ ID NO:196, SEQ ID NO:197, SEQ ID NO:198, SEQ ID NO:199, SEQ ID NO:200, SEQ ID NO:201, SEQ ID NO:202, SEQ ID NO:203, SEQ ID NO:204, SEQ ID NO:205, SEQ ID NO:206, SEQ ID NO:207, SEQ ID NO:208, SEQ ID NO:209, SEQ ID NO:210, SEQ ID NO:211, SEQ ID NO:212, SEQ ID NO:213, SEQ ID NO:214, SEQ ID NO:215, SEQ ID NO:216, SEQ ID NO:217, SEQ ID NO:218, SEQ ID NO:219, SEQ ID NO:220, SEQ ID NO:221, SEQ ID NO:222, SEQ ID NO:223, SEQ ID NO:224, SEQ ID NO:225, SEQ ID NO:226, SEQ ID NO:227, SEQ ID NO:228, SEQ ID NO:229, SEQ ID NO:230, SEQ ID NO:231, SEQ ID NO:232, SEQ ID NO:233, SEQ ID NO:234, SEQ ID NO:235, SEQ ID NO:236, SEQ ID NO:237, SEQ ID NO:238, SEQ ID NO:239, SEQ ID NO:240, SEQ ID NO:241, and SEQ ID NO:242, or the corresponding full-length amino acid sequence, or functional derivatives thereof.

[0049] Methods for using the probes include detecting the presence or amount of kinase RNA in a sample by contacting the sample with a nucleic acid probe under conditions such that hybridization occurs and detecting the presence or amount of the probe bound to kinase RNA. The nucleic acid duplex formed between the probe and a nucleic acid sequence coding for a kinase polypeptide may be used in the identification of the sequence of the nucleic acid detected (Nelson et al., in Nonisotopic DNA Probe Techniques, Academic Press, San Diego, Kricka, ed., p. 275, 1992, hereby incorporated by reference herein in its entirety, including any drawings, figures, or tables). Kits for performing such methods may be constructed to include a container means having disposed therein a nucleic acid probe.

[0050] In a third aspect, the invention describes a recombinant cell or tissue comprising a nucleic acid molecule encoding a kinase polypeptide selected from the group consisting of SEQ ID NO:122, SEQ ID NO:123, SEQ ID NO:124, SEQ ID NO:125, SEQ ID NO:126, SEQ ID NO:127, SEQ ID NO:128, SEQ ID NO:129, SEQ ID NO:130, SEQ ID NO:131, SEQ ID NO:132, SEQ ID NO:133, SEQ ID NO:134, SEQ ID NO:135, SEQ ID NO:136, SEQ ID NO:137, SEQ ID NO:138, SEQ ID NO:139, SEQ ID NO:140, SEQ ID NO:141, SEQ ID NO:142, SEQ ID NO:143, SEQ ID NO:144, SEQ ID NO:145, SEQ ID NO:146, SEQ ID NO:147, SEQ ID NO:148, SEQ ID NO:149, SEQ ID NO:150, SEQ ID NO:151, SEQ ID NO:152, SEQ ID NO:153, SEQ ID NO:154, SEQ ID NO:155, SEQ ID NO:156, SEQ ID NO:157, SEQ ID NO:158, SEQ ID NO:159, SEQ ID NO:160, SEQ ID NO:161, SEQ ID NO:162, SEQ ID NO:163, SEQ ID NO:164, SEQ ID NO:165. SEQ ID NO:166, SEQ ID NO:167, SEQ ID NO:168, SEQ ID NO:169, SEQ ID NO:170, SEQ ID NO:171, SEQ ID NO:172, SEQ ID NO:173, SEQ ID NO:174, SEQ ID NO:175, SEQ ID NO:176, SEQ ID NO:177, SEQ ID NO:178, SEQ ID NO:179, SEQ ID NO:180, SEQ ID NO:181, SEQ ID NO:182, SEQ ID NO:183, SEQ ID NO:184, SEQ ID NO:185, SEQ ID NO:186, SEQ ID NO:187, SEQ ID NO:188, SEQ ID NO:189, SEQ ID NO:190, SEQ ID NO:191, SEQ ID NO:199, SEQ ID NO:193, SEQ ID NO:194, SEQ ID NO:195, SEQ ID NO:196, SEQ ID NO:197, SEQ ID NO:198, SEQ ID NO:199, SEQ ID NO:200, SEQ ID NO:201, SEQ ID NO:202, SEQ ID NO:203, SEQ ID NO:204, SEQ ID NO:205, SEQ ID NO:206, SEQ ID NO:207, SEQ ID NO:208, SEQ ID NO:209, SEQ ID NO:210, SEQ ID NO:211, SEQ ID NO:212, SEQ ID NO:213, SEQ ID NO:214, SEQ ID NO:215, SEQ ID NO:216, SEQ ID NO:217, SEQ ID NO:218, SEQ ID NO:219, SEQ ID NO:220, SEQ ID NO:221, SEQ ID NO:222, SEQ ID NO:223, SEQ ID NO:224, SEQ ID NO:225, SEQ ID NO:226, SEQ ID NO:227, SEQ ID NO:228, SEQ ID NO:229, SEQ ID NO:230, SEQ ID NO:231, SEQ ID NO:232, SEQ ID NO:233, SEQ ID NO:234, SEQ ID NO:235, SEQ ID NO:236, SEQ ID NO:237, SEQ ID NO:238, SEQ ID NO:239, SEQ ID NO:240, SEQ ID NO:241, and SEQ ID NO:242. In such cells, the nucleic acid may be under the control of the genomic regulatory elements, or may be under the control of exogenous regulatory elements including an exogenous promoter. By “exogenous” it is meant a promoter that is not normally coupled in vivo transcriptionally to the coding sequence for the kinase polypeptides.

[0051] The polypeptide is preferably a fragment of the protein encoded by an amino acid sequence selected from the group consisting of those set forth in SEQ ID NO:122, SEQ ID NO:123, SEQ ID NO:124, SEQ ID NO:125, SEQ ID NO:126, SEQ ID NO:127, SEQ ID NO:128, SEQ ID NO:129, SEQ ID NO:130, SEQ ID NO:131, SEQ ID NO:132, SEQ ID NO:133, SEQ ID NO:134, SEQ ID NO:135, SEQ ID NO:136, SEQ ID NO:137, SEQ ID NO:138, SEQ ID NO:139, SEQ ID NO:140, SEQ ID NO:141, SEQ ID NO:142, SEQ ID NO:143, SEQ ID NO:144, SEQ ID NO:145, SEQ ID NO:146, SEQ ID NO:147, SEQ ID NO:148, SEQ ID NO:149, SEQ ID NO:150, SEQ ID NO:151, SEQ ID NO:152, SEQ ID NO:153, SEQ ID NO:154, SEQ ID NO:155, SEQ ID NO:156, SEQ ID NO:157, SEQ ID NO:158, SEQ ID NO:159, SEQ ID NO:160, SEQ ID NO:161, SEQ ID NO:162, SEQ ID NO:163, SEQ ID NO:164, SEQ ID NO:165. SEQ ID NO:166, SEQ ID NO:167, SEQ ID NO:168, SEQ ID NO:169, SEQ ID NO:170, SEQ ID NO:171, SEQ ID NO:172, SEQ ID NO:173, SEQ ID NO:174, SEQ ID NO:175, SEQ ID NO:176, SEQ ID NO:177, SEQ ID NO:178, SEQ ID NO:179, SEQ ID NO:180, SEQ ID NO:181, SEQ ID NO:182, SEQ ID NO:183, SEQ ID NO:184, SEQ ID NO:185, SEQ ID NO:186, SEQ ID NO:187, SEQ ID NO:188, SEQ ID NO:189, SEQ ID NO:190, SEQ ID NO:191, SEQ ID NO:199, SEQ ID NO:193, SEQ ID NO:194, SEQ ID NO:195, SEQ ID NO:196, SEQ ID NO:197, SEQ ID NO:198, SEQ ID NO:199, SEQ ID NO:200, SEQ ID NO:201, SEQ ID NO:202, SEQ ID NO:203, SEQ ID NO:204, SEQ ID NO:205, SEQ ID NO:206, SEQ ID NO:207, SEQ ID NO:208, SEQ ID NO:209, SEQ ID NO:210, SEQ ID NO:211, SEQ ID NO:212, SEQ ID NO:213, SEQ ID NO:214, SEQ ID NO:215, SEQ ID NO:216, SEQ ID NO:217, SEQ ID NO:218, SEQ ID NO:219, SEQ ID NO:220, SEQ ID NO:221, SEQ ID NO:222, SEQ ID NO:223, SEQ ID NO:224, SEQ ID NO:225, SEQ ID NO:226, SEQ ID NO:227, SEQ ID NO:228, SEQ ID NO:229, SEQ ID NO:230, SEQ ID NO:231, SEQ ID NO:232, SEQ ID NO:233, SEQ ID NO:234, SEQ ID NO:235, SEQ ID NO:236, SEQ ID NO:237, SEQ ID NO:238, SEQ ID NO:239, SEQ ID NO:240, SEQ ID NO:241, and SEQ ID NO:242, or the corresponding full-length amino acid sequence. By “fragment,” is meant an amino acid sequence present in a kinase polypeptide. Preferably, such a sequence comprises at least 10, 20, 40, 50, 75, 100, 200, or 300 contiguous amino acids a sequence selected from the group consisting of those set forth in SEQ ID NO:122, SEQ ID NO:123, SEQ ID NO:124, SEQ ID NO:125, SEQ ID NO:126, SEQ ID NO:127, SEQ ID NO:128, SEQ ID NO:129, SEQ ID NO:130, SEQ ID NO:131, SEQ ID NO:132, SEQ ID NO:133, SEQ ID NO:134, SEQ ID NO:135, SEQ ID NO:136, SEQ ID NO:137, SEQ ID NO:138, SEQ ID NO:139, SEQ ID NO:140, SEQ ID NO:141, SEQ ID NO:142, SEQ ID NO:143, SEQ ID NO:144, SEQ ID NO:145, SEQ ID NO:146, SEQ ID NO:147, SEQ ID NO:148, SEQ ID NO:149, SEQ ID NO:150, SEQ ID NO:151, SEQ ID NO:152, SEQ ID NO:153, SEQ ID NO:154, SEQ ID NO:155, SEQ ID NO:156, SEQ ID NO:157, SEQ ID NO:158, SEQ ID NO:159, SEQ ID NO:160, SEQ ID NO:161, SEQ ID NO:162, SEQ ID NO:163, SEQ ID NO:164, SEQ ID NO:165. SEQ ID NO:166, SEQ ID NO:167, SEQ ID NO:168, SEQ ID NO:169, SEQ ID NO;170, SEQ ID NO:171, SEQ ID NO:172, SEQ ID NO:173, SEQ ID NO:174, SEQ ID NO:175, SEQ ID NO:176, SEQ ID NO:177, SEQ ID NO:178, SEQ ID NO:179, SEQ ID NO:180, SEQ ID NO:181, SEQ ID NO:182, SEQ ID NO:183, SEQ ID NO:184, SEQ ID NO:185, SEQ ID NO:186, SEQ ID NO:187, SEQ ID NO:188, SEQ ID NO:189, SEQ ID NO:190, SEQ ID NO:191, SEQ ID NO:199, SEQ ID NO:193, SEQ ID NO:194, SEQ ID NO:195, SEQ ID NO:196, SEQ ID NO:197, SEQ ID NO:198, SEQ ID NO:199, SEQ ID NO:200, SEQ ID NO:201, SEQ ID NO:202, SEQ ID NO:203, SEQ ID NO:204, SEQ ID NO:205, SEQ ID NO:206, SEQ ID NO:207, SEQ ID NO:208, SEQ ID NO:209, SEQ ID NO:210, SEQ ID NO:211, SEQ ID NO:212, SEQ ID NO:213, SEQ ID NO:214, SEQ ID NO:215, SEQ ID NO:216, SEQ ID NO:217, SEQ ID NO:218, SEQ ID NO:219, SEQ ID NO:220, SEQ ID NO:221, SEQ ID NO:222, SEQ ID NO:223, SEQ ID NO:224, SEQ ID NO:225, SEQ ID NO:226, SEQ ID NO:227, SEQ ID NO:228, SEQ ID NO:229, SEQ ID NO:230, SEQ ID NO:231, SEQ ID NO:232, SEQ ID NO:233, SEQ ID NO:234, SEQ ID NO:235, SEQ ID NO:236, SEQ ID NO:237, SEQ ID NO:238, SEQ ID NO:239, SEQ ID NO:240, SEQ ID NO:241, and SEQ ID NO:242, or of the corresponding full-length amino acid sequence, or a functional derivative thereof.

[0052] In a fourth aspect, the invention features an isolated, enriched, or purified kinase polypeptide selected from the group consisting of SEQ ID NO:122, SEQ ID NO:123, SEQ ID NO:124, SEQ ID NO:125, SEQ ID NO:126, SEQ ID NO:127, SEQ ID NO:128, SEQ ID NO:129, SEQ ID NO:130, SEQ ID NO:131, SEQ ID NO:132, SEQ ID NO:133, SEQ ID NO:134, SEQ ID NO:135, SEQ ID NO:136, SEQ ID NO:137, SEQ ID NO:138, SEQ ID NO:139, SEQ ID NO:140, SEQ ID NO:141, SEQ ID NO:142, SEQ ID NO:143, SEQ ID NO:144, SEQ ID NO:145, SEQ ID NO:146, SEQ ID NO:147, SEQ ID NO:148, SEQ ID NO:149, SEQ ID NO:150, SEQ ID NO:151, SEQ ID NO:152, SEQ ID NO:153, SEQ ID NO:154, SEQ ID NO:155, SEQ ID NO:156, SEQ ID NO:157, SEQ ID NO:158, SEQ ID NO:159, SEQ ID NO:160, SEQ ID NO:161, SEQ ID NO:162, SEQ ID NO:163, SEQ ID NO:164, SEQ ID NO:165. SEQ ID NO:166, SEQ ID NO:167, SEQ ID NO:168, SEQ ID NO:169, SEQ ID NO:170, SEQ ID NO:171, SEQ ID NO:172, SEQ ID NO:173, SEQ ID NO:174, SEQ ID NO:175, SEQ ID NO:176, SEQ ID NO:177, SEQ ID NO:178, SEQ ID NO:179, SEQ ID NO:180, SEQ ID NO:181, SEQ ID NO:182, SEQ ID NO:183, SEQ ID NO:184, SEQ ID NO:185, SEQ ID NO:186, SEQ ID NO:187, SEQ ID NO:188, SEQ ID NO:189, SEQ ID NO:190, SEQ ID NO:191, SEQ ID NO:199, SEQ ID NO:193, SEQ ID NO:194, SEQ ID NO:195, SEQ ID NO:196, SEQ ID NO:197, SEQ ID NO:198, SEQ ID NO:199, SEQ ID NO:200, SEQ ID NO:201, SEQ ID NO:202, SEQ ID NO:203, SEQ ID NO:204, SEQ ID NO:205, SEQ ID NO:206, SEQ ID NO:207, SEQ ID NO:208, SEQ ID NO:209, SEQ ID NO:210, SEQ ID NO:211, SEQ ID NO:212, SEQ ID NO:213, SEQ ID NO:214, SEQ ID NO:215, SEQ ID NO:216, SEQ ID NO:217, SEQ ID NO:218, SEQ ID NO:219, SEQ ID NO:220, SEQ ID NO:221, SEQ ID NO:222, SEQ ID NO:223, SEQ ID NO:224, SEQ ID NO:225, SEQ ID NO:226, SEQ ID NO:227, SEQ ID NO:228, SEQ ID NO:229, SEQ ID NO:230, SEQ ID NO:231, SEQ ID NO:232, SEQ ID NO:233, SEQ ID NO:234, SEQ ID NO:235, SEQ ID NO:236, SEQ ID NO:237, SEQ ID NO:238, SEQ ID NO:239, SEQ ID NO:240, SEQ ID NO:241, and SEQ ID NO:242.

[0053] By “isolated” in reference to a polypeptide is meant a polymer of amino acids (2 or more amino acids) conjugated to each other, including polypeptides that are isolated from a natural source or that are synthesized. The isolated polypeptides of the present invention are unique in the sense that they are not found in a pure or separated state in nature. Use of the term “isolated” indicates that a naturally occurring sequence has been removed from its normal cellular environment. Thus, the sequence may be in a cell-free solution or placed in a different cellular environment. The term does not imply that the sequence is the only amino acid chain present, but that it is essentially free (about 90-95% pure at least) of non-amino acid material naturally associated with it.

[0054] By the use of the term “enriched” in reference to a polypeptide is meant that the specific amino acid sequence constitutes a significantly higher fraction (2-5 fold) of the total amino acid sequences present in the cells or solution of interest than in normal or diseased cells or in the cells from which the sequence was taken. This could be caused by a person by preferential reduction in the amount of other amino acid sequences present, or by a preferential increase in the amount of the specific amino acid sequence of interest, or by a combination of the two. However, it should be noted that enriched does not imply that there are no other amino acid sequences present, just that the relative amount of the sequence of interest has been significantly increased. The term significant here is used to indicate that the level of increase is useful to the person making such an increase, and generally means an increase relative to other amino acid sequences of about at least 2-fold, more preferably at least 5- to 10-fold or even more. The term also does not imply that there is no amino acid sequence from other sources. The other source of amino acid sequences may, for example, comprise amino acid sequence encoded by a yeast or bacterial genome, or a cloning vector such as pUC19. The term is meant to cover only those situations in which man has intervened to increase the proportion of the desired amino acid sequence.

[0055] It is also advantageous for some purposes that an amino acid sequence be in purified form. The term “purified” in reference to a polypeptide does not require absolute purity (such as a homogeneous preparation); instead, it represents an indication that the sequence is relatively purer than in the natural environment. Compared to the natural level this level should be at least 2-5 fold greater (e.g., in terms of mg/mL). Purification of at least one order of magnitude, preferably two or three orders, and more preferably four or five orders of magnitude is expressly contemplated. The substance is preferably free of contamination at a functionally significant level, for example 90%, 95%, or 99% pure.

[0056] In preferred embodiments, the kinase polypeptide is a fragment of the protein encoded by an amino acid sequence selected from the group consisting of those set forth in SEQ ID NO:122, SEQ ID NO:123, SEQ ID NO:124, SEQ ID NO:125, SEQ ID NO:126, SEQ ID NO:127, SEQ ID NO:128, SEQ ID NO:129, SEQ ID NO:130, SEQ ID NO:131, SEQ ID NO:132, SEQ ID NO:133, SEQ ID NO:134, SEQ ID NO:135, SEQ ID NO:136, SEQ ID NO:137, SEQ ID NO:138, SEQ ID NO:139, SEQ ID NO:140, SEQ ID NO:141, SEQ ID NO:142, SEQ ID NO:143, SEQ ID NO:144, SEQ ID NO:145, SEQ ID NO:146, SEQ ID NO:147, SEQ ID NO:148, SEQ ID NO:149, SEQ ID NO:150, SEQ ID NO:151, SEQ ID NO:152, SEQ ID NO:153, SEQ ID NO:154, SEQ ID NO:155, SEQ ID NO:156, SEQ ID NO:157, SEQ ID NO:158, SEQ ID NO:159, SEQ ID NO:160, SEQ ID NO:161, SEQ ID NO:162, SEQ ID NO:163, SEQ ID NO:164, SEQ ID NO:165. SEQ ID NO:166, SEQ ID NO:167, SEQ ID NO:168, SEQ ID NO:169, SEQ ID NO:170, SEQ ID NO:171, SEQ ID NO:172, SEQ ID NO:173, SEQ ID NO:174, SEQ ID NO:175, SEQ ID NO:176, SEQ ID NO:177, SEQ ID NO:178, SEQ ID NO:179, SEQ ID NO:180, SEQ ID NO:181, SEQ ID NO:182, SEQ ID NO:183, SEQ ID NO:184, SEQ ID NO:185, SEQ ID NO:186, SEQ ID NO:187, SEQ ID NO:188, SEQ ID NO:189, SEQ ID NO:190, SEQ ID NO:191, SEQ ID NO:199, SEQ ID NO:193, SEQ ID NO:194, SEQ ID NO:195, SEQ ID NO:196, SEQ ID NO:197, SEQ ID NO:198, SEQ ID NO:199, SEQ ID NO:200, SEQ ID NO:201, SEQ ID NO:202, SEQ ID NO:203, SEQ ID NO:204, SEQ ID NO:205, SEQ ID NO:206, SEQ ID NO:207, SEQ ID NO:208, SEQ ID NO:209, SEQ ID NO:210, SEQ ID NO:211, SEQ ID NO:212, SEQ ID NO:213, SEQ ID NO:214, SEQ ID NO:215, SEQ ID NO:216, SEQ ID NO:217, SEQ ID NO:218, SEQ ID NO:219, SEQ ID NO:220, SEQ ID NO:221, SEQ ID NO:222, SEQ ID NO:223, SEQ ID NO:224, SEQ ID NO:225, SEQ ID NO:226, SEQ ID NO:227, SEQ ID NO:228, SEQ ID NO:229, SEQ ID NO:230, SEQ ID NO:231, SEQ ID NO:232, SEQ ID NO:233, SEQ ID NO:234, SEQ ID NO:235, SEQ ID NO:236, SEQ ID NO:237, SEQ ID NO:238, SEQ ID NO:239, SEQ ID NO:240, SEQ ID NO:241, and SEQ ID NO:242, or the corresponding full-length amino acid sequences. Preferably, the kinase polypeptide contains at least 10, 20, 40, 50, 75, 100, 200, or 300 contiguous amino acids a sequence selected from the group consisting of those set forth in SEQ ID NO:122, SEQ ID NO:123, SEQ ID NO:124, SEQ ID NO:125, SEQ ID NO:126, SEQ ID NO:127, SEQ ID NO:128, SEQ ID NO:129, SEQ ID NO:130, SEQ ID NO:131, SEQ ID NO:132, SEQ ID NO:133, SEQ ID NO:134, SEQ ID NO:135, SEQ ID NO:136, SEQ ID NO:137, SEQ ID NO:138, SEQ ID NO:139, SEQ ID NO:140, SEQ ID NO:141, SEQ ID NO:142, SEQ ID NO:143, SEQ ID NO:144, SEQ ID NO:145, SEQ ID NO:146, SEQ ID NO:147, SEQ ID NO:148, SEQ ID NO:149, SEQ ID NO:150, SEQ ID NO:151, SEQ ID NO:152, SEQ ID NO:153, SEQ ID NO:154, SEQ ID NO:155, SEQ ID NO:156, SEQ ID NO:157, SEQ ID NO:158, SEQ ID NO:159, SEQ ID NO:160, SEQ ID NO:161, SEQ ID NO:162, SEQ ID NO:163, SEQ ID NO:164, SEQ ID NO:165. SEQ ID NO:166, SEQ ID NO:167, SEQ ID NO:168, SEQ ID NO:169, SEQ ID NO:170, SEQ ID NO:171, SEQ ID NO:172, SEQ ID NO:173, SEQ ID NO:174, SEQ ID NO:175, SEQ ID NO:176, SEQ ID NO:177, SEQ ID NO:178, SEQ ID NO:179, SEQ ID NO:180, SEQ ID NO:181, SEQ ID NO:182, SEQ ID NO:183, SEQ ID NO:184, SEQ ID NO:185, SEQ ID NO:186, SEQ ID NO:187, SEQ ID NO:188, SEQ ID NO:189, SEQ ID NO:190, SEQ ID NO:191, SEQ ID NO:199, SEQ ID NO:193, SEQ ID NO:194, SEQ ID NO:195, SEQ ID NO:196, SEQ ID NO:197, SEQ ID NO:198, SEQ ID NO:199, SEQ ID NO:200, SEQ ID NO:201, SEQ ID NO:202, SEQ ID NO:203, SEQ ID NO:204, SEQ ID NO:205, SEQ ID NO:206, SEQ ID NO:207, SEQ ID NO:208, SEQ ID NO:209, SEQ ID NO:210, SEQ ID NO:211, SEQ ID NO:212, SEQ ID NO:213, SEQ ID NO:214, SEQ ID NO:215, SEQ ID NO:216, SEQ ID NO:217, SEQ ID NO:218, SEQ ID NO:219, SEQ ID NO:220, SEQ ID NO:221, SEQ ID NO:222, SEQ ID NO:223, SEQ ID NO:224, SEQ ID NO:225, SEQ ID NO:226, SEQ ID NO:227, SEQ ID NO:228, SEQ ID NO:229, SEQ ID NO:230, SEQ ID NO:231, SEQ ID NO:232, SEQ ID NO:233, SEQ ID NO:234, SEQ ID NO:235, SEQ ID NO:236, SEQ ID NO:237, SEQ ID NO:238, SEQ ID NO:239, SEQ ID NO:240, SEQ ID NO:241, and SEQ ID NO:242, or the corresponding full-length amino acid sequence, or a functional derivative thereof.

[0057] In preferred embodiments, the kinase polypeptide comprises an amino acid sequence having (a) an amino acid sequence selected from the group consisting of those set forth in SEQ ID NO:122, SEQ ID NO:123, SEQ ID NO:124, SEQ ID NO:125, SEQ ID NO:126, SEQ ID NO:127, SEQ ID NO:128, SEQ ID NO:129, SEQ ID NO:130, SEQ ID NO:131, SEQ ID NO:132, SEQ ID NO:133, SEQ ID NO:134, SEQ ID NO:135, SEQ ID NO:136, SEQ ID NO:137, SEQ ID NO:138, SEQ ID NO:139, SEQ ID NO:140, SEQ ID NO:141, SEQ ID NO:142, SEQ ID NO:143, SEQ ID NO:144, SEQ ID NO:145, SEQ ID NO:146, SEQ ID NO:147, SEQ ID NO:148, SEQ ID NO:149, SEQ ID NO:150, SEQ ID NO:151, SEQ ID NO:152, SEQ ID NO:153, SEQ ID NO:154, SEQ ID NO:155, SEQ ID NO:156, SEQ ID NO:157, SEQ ID NO:158, SEQ ID NO:159, SEQ ID NO:160, SEQ ID NO:161, SEQ ID NO:162, SEQ ID NO:163, SEQ ID NO:164, SEQ ID NO:165. SEQ ID NO:166, SEQ ID NO:167, SEQ ID NO:168, SEQ ID NO:169, SEQ ID NO:170, SEQ ID NO:171, SEQ ID NO:172, SEQ ID NO:173, SEQ ID NO:174, SEQ ID NO:175, SEQ ID NO:176, SEQ ID NO:177, SEQ ID NO:178, SEQ ID NO:179, SEQ ID NO:180, SEQ ID NO:181, SEQ ID NO:182, SEQ ID NO:183, SEQ ID NO:184, SEQ ID NO:185, SEQ ID NO:186, SEQ ID NO:187, SEQ ID NO:188, SEQ ID NO:189, SEQ ID NO:190, SEQ ID NO:191, SEQ ID NO:199, SEQ ID NO:193, SEQ ID NO:194, SEQ ID NO:195, SEQ ID NO:196, SEQ ID NO:197, SEQ ID NO:198, SEQ ID NO:199, SEQ ID NO:200, SEQ ID NO:201, SEQ ID NO:202, SEQ ID NO:203, SEQ ID NO:204, SEQ ID NO:205, SEQ ID NO:206, SEQ ID NO:207, SEQ ID NO:208, SEQ ID NO:209, SEQ ID NO:210, SEQ ID NO:211, SEQ ID NO:212, SEQ ID NO:213, SEQ ID NO:214, SEQ ID NO:215, SEQ ID NO:216, SEQ ID NO:217, SEQ ID NO:218, SEQ ID NO:219, SEQ ID NO:220, SEQ ID NO:221, SEQ ID NO:222, SEQ ID NO:223, SEQ ID NO:224, SEQ ID NO:225, SEQ ID NO:226, SEQ ID NO:227, SEQ ID NO:228, SEQ ID NO:229, SEQ ID NO:230, SEQ ID NO:231, SEQ ID NO:232, SEQ ID NO:233, SEQ ID NO:234, SEQ ID NO:235, SEQ ID NO:236, SEQ ID NO:237, SEQ ID NO:238, SEQ ID NO:239, SEQ ID NO:240, SEQ ID NO:241, and SEQ ID NO:242; () an amino acid sequence selected from the group consisting of those set forth in SEQ ID NO:122, SEQ ID NO:123, SEQ ID NO:124, SEQ ID NO:125, SEQ ID NO:126, SEQ ID NO:127, SEQ ID NO:128, SEQ ID NO:129, SEQ ID NO:130, SEQ ID NO:131, SEQ ID NO:132, SEQ ID NO:133, SEQ ID NO:134, SEQ ID NO:135, SEQ ID NO:136, SEQ ID NO:137, SEQ ID NO:138, SEQ ID NO:139, SEQ ID NO:140, SEQ ID NO:141, SEQ ID NO:142, SEQ ID NO:143, SEQ ID NO:144, SEQ ID NO:145, SEQ ID NO:146, SEQ ID NO:147, SEQ ID NO:148, SEQ ID NO:149, SEQ ID NO:150, SEQ ID NO:151, SEQ ID NO:152, SEQ ID NO:153, SEQ ID NO:154, SEQ ID NO:155, SEQ ID NO:156, SEQ ID NO:157, SEQ ID NO:158, SEQ ID NO:159, SEQ ID NO:160, SEQ ID NO:161, SEQ ID NO:162, SEQ ID NO:163, SEQ ID NO:164, SEQ ID NO:165. SEQ ID NO:166, SEQ ID NO:167, SEQ ID NO:168, SEQ ID NO:169, SEQ ID NO:170, SEQ ID NO:171, SEQ ID NO:172, SEQ ID NO:173, SEQ ID NO:174, SEQ ID NO:175, SEQ ID NO:176, SEQ ID NO:177, SEQ ID NO:178, SEQ ID NO:179, SEQ ID NO:180, SEQ ID NO:181, SEQ ID NO:182, SEQ ID NO:183, SEQ ID NO:184, SEQ ID NO:185, SEQ ID NO:186, SEQ ID NO:187, SEQ ID NO:188, SEQ ID NO:189, SEQ ID NO:190, SEQ ID NO:191, SEQ ID NO:199, SEQ ID NO:193, SEQ ID NO:194, SEQ ID NO:195, SEQ ID NO:196, SEQ ID NO:197, SEQ ID NO:198, SEQ ID NO:199, SEQ ID NO:200, SEQ ID NO:201, SEQ ID NO:202, SEQ ID NO:203, SEQ ID NO:204, SEQ ID NO:205, SEQ ID NO:206, SEQ ID NO:207, SEQ ID NO:208, SEQ ID NO:209, SEQ ID NO:210, SEQ ID NO:211, SEQ ID NO:212, SEQ ID NO:213, SEQ ID NO:214, SEQ ID NO:215, SEQ ID NO:216, SEQ ID NO:217, SEQ ID NO:218, SEQ ID NO:219, SEQ ID NO:220, SEQ ID NO:221, SEQ ID NO:222, SEQ ID NO:223, SEQ ID NO:224, SEQ ID NO:225, SEQ ID NO:226, SEQ ID NO:227, SEQ ID NO:228, SEQ ID NO:229, SEQ ID NO:230, SEQ ID NO:231, SEQ ID NO:232, SEQ ID NO:233, SEQ ID NO:234, SEQ ID NO:235, SEQ ID NO:236, SEQ ID NO:237, SEQ ID NO:238, SEQ ID NO:239, SEQ ID NO:240, SEQ ID NO:241, and SEQ ID NO:242, except that it lacks one or more, but not all, of a domain selected from the group consisting of an N-terminal domain, a catalytic domain, a C-terminal domain, a coiled-coil structure region, a proline-rich region, a spacer region, an insert, and a C-terminal tail; (c) an amino acid sequence of a domain of a polypeptide selected from the group consisting of those set forth in SEQ ID NO:122, SEQ ID NO:123, SEQ ID NO:124, SEQ ID NO:125, SEQ ID NO:126, SEQ ID NO:127, SEQ ID NO:128, SEQ ID NO:129, SEQ ID NO:130, SEQ ID NO:131, SEQ ID NO:132, SEQ ID NO:133, SEQ ID NO:134, SEQ ID NO:135, SEQ ID NO:136, SEQ ID NO:137, SEQ ID NO:138, SEQ ID NO:139, SEQ ID NO:140, SEQ ID NO:141, SEQ ID NO:142, SEQ ID NO:143, SEQ ID NO:144, SEQ ID NO:145, SEQ ID NO:146, SEQ ID NO:147, SEQ ID NO:148, SEQ ID NO:149, SEQ ID NO:150, SEQ ID NO:151, SEQ ID NO:152, SEQ ID NO:153, SEQ ID NO:154, SEQ ID NO:155, SEQ ID NO:156, SEQ ID NO:157, SEQ ID NO:158, SEQ ID NO:159, SEQ ID NO:160, SEQ ID NO:161, SEQ ID NO:162, SEQ ID NO:163, SEQ ID NO:164, SEQ ID NO:165. SEQ ID NO:166, SEQ ID NO:167, SEQ ID NO:168, SEQ ID NO:169, SEQ ID NO:170, SEQ ID NO:171, SEQ ID NO:172, SEQ ID NO:173, SEQ ID NO:174, SEQ ID NO:175, SEQ ID NO:176, SEQ ID NO:177, SEQ ID NO:178, SEQ ID NO:179, SEQ ID NO:180, SEQ ID NO:181, SEQ ID NO:182, SEQ ID NO:183, SEQ ID NO:184, SEQ ID NO:185, SEQ ID NO:186, SEQ ID NO:187, SEQ ID NO:188, SEQ ID NO:189, SEQ ID NO:190, SEQ ID NO:191, SEQ ID NO:199, SEQ ID NO:193, SEQ ID NO:194, SEQ ID NO:195, SEQ ID NO:196, SEQ ID NO:197, SEQ ID NO:198, SEQ ID NO:199, SEQ ID NO:200, SEQ ID NO:201, SEQ ID NO:202, SEQ ID NO:203, SEQ ID NO:204, SEQ ID NO:205, SEQ ID NO:206, SEQ ID NO:207, SEQ ID NO:208, SEQ ID NO:209, SEQ ID NO:210, SEQ ID NO:211, SEQ ID NO:212, SEQ ID NO:213, SEQ ID NO:214, SEQ ID NO:215, SEQ ID NO:216, SEQ ID NO:217, SEQ ID NO:218, SEQ ID NO:219, SEQ ID NO:220, SEQ ID NO:221, SEQ ID NO:222, SEQ ID NO:223, SEQ ID NO:224, SEQ ID NO:225, SEQ ID NO:226, SEQ ID NO:227, SEQ ID NO:228, SEQ ID NO:229, SEQ ID NO:230, SEQ ID NO:231, SEQ ID NO:232, SEQ ID NO:233, SEQ ID NO:234, SEQ ID NO:235, SEQ ID NO:236, SEQ ID NO:237, SEQ ID NO:238, SEQ ID NO:239, SEQ ID NO:240, SEQ ID NO:241, and SEQ ID NO:242 where the domain is selected from the group consisting of an N-terminal domain, a catalytic domain, a C-terminal domain, a coiled-coil structure region, a proline-rich region, a spacer region, an insert, and a C-terminal tail; or (d) an amino acid sequence selected from the group consisting of those set forth in SEQ ID NO:122, SEQ ID NO:123, SEQ ID NO:124, SEQ ID NO:125, SEQ ID NO:126, SEQ ID NO:127, SEQ ID NO:128, SEQ ID NO:129, SEQ ID NO:130, SEQ ID NO:131, SEQ ID NO:132, SEQ ID NO:133, SEQ ID NO:134, SEQ ID NO:135, SEQ II NO:136, SEQ ID NO:137, SEQ ID NO:138, SEQ ID NO:139, SEQ ID NO:140, SEQ ID NO:141, SEQ ID NO:142, SEQ ID NO:143, SEQ ID NO:144, SEQ ID NO:145, SEQ ID NO:146, SEQ ID NO:147, SEQ ID NO:148, SEQ ID NO:149, SEQ ID NO:150, SEQ ID NO:151, SEQ ID NO:152, SEQ ID NO:153, SEQ ID NO:154, SEQ ID NO:155, SEQ ID NO:156, SEQ ID NO:157, SEQ ID NO:158, SEQ ID NO:159, SEQ ID NO:160, SEQ ID NO:161, SEQ ID NO:162, SEQ ID NO:163, SEQ ID NO:164, SEQ ID NO:165. SEQ ID NO:166, SEQ ID NO:167, SEQ ID NO:168, SEQ ID NO:169, SEQ ID NO:170, SEQ ID NO:171, SEQ ID NO:172, SEQ ID NO:173, SEQ ID NO:174, SEQ ID NO:175, SEQ ID NO:176, SEQ ID NO:177, SEQ ID NO:178, SEQ ID NO:179, SEQ ID NO:180, SEQ ID NO:181, SEQ ID NO:182, SEQ ID NO:183, SEQ ID NO:184, SEQ ID NO:185, SEQ ID NO:186, SEQ ID NO:187, SEQ ID NO:188, SEQ ID NO:189, SEQ ID NO:190, SEQ ID NO:191, SEQ ID NO:199, SEQ ID NO:193, SEQ ID NO:194, SEQ ID NO:195, SEQ ID NO:196, SEQ ID NO:197, SEQ ID NO:198, SEQ ID NO:199, SEQ ID NO:200, SEQ ID NO:201, SEQ ID NO:202, SEQ ID NO:203, SEQ ID NO:204, SEQ ID NO:205, SEQ ID NO:206, SEQ ID NO:207, SEQ ID NO:208, SEQ ID NO:209, SEQ ID NO:210, SEQ ID NO:211, SEQ ID NO:212, SEQ ID NO:213, SEQ ID NO:214, SEQ ID NO:215, SEQ ID NO:216, SEQ ID NO:217, SEQ ID NO:218, SEQ ID NO:219, SEQ ID NO:220, SEQ ID NO:221, SEQ ID NO:222, SEQ ID NO:223, SEQ ID NO:224, SEQ ID NO:225, SEQ ID NO:226, SEQ ID NO:227, SEQ ID NO:228, SEQ ID NO:229, SEQ ID NO:230, SEQ ID NO:231, SEQ ID NO:232, SEQ ID NO:233, SEQ ID NO:234, SEQ ID NO:235, SEQ ID NO:236, SEQ ID NO:237, SEQ ID NO:238, SEQ ID NO:239, SEQ ID NO:240, SEQ ID NO:241, and SEQ ID NO:242, except that it lacks one or more, but not all, of the domains selected from the group consisting of a C-terminal domain, a catalytic domain, an N-terminal domain, a spacer region, a proline-rich region, a coiled-coil structure region, an insert, and a C-terminal tail. (The domain demarcations of the polypeptides of the invention are indicated in Table 2 by reference to the kinase domain.)

[0058] The polypeptide can be isolated from a natural source by methods well-known in the art. The natural source may be mammalian, preferably human, blood, semen, or tissue, and the polypeptide may be synthesized using an automated polypeptide synthesizer. The isolated, enriched, or purified kinase polypeptide is preferably selected from the group consisting of those set forth in SEQ ID NO:122, SEQ ID NO:123, SEQ ID NO:124, SEQ ID NO:125, SEQ ID NO:126, SEQ ID NO:127, SEQ ID NO:128, SEQ ID NO:129, SEQ ID NO:130, SEQ ID NO:131, SEQ ID NO:132, SEQ ID NO:133, SEQ ID NO:134, SEQ ID NO:135, SEQ ID NO:136, SEQ ID NO:137, SEQ ID NO:138, SEQ ID NO:139, SEQ ID NO:140, SEQ ID NO:141, SEQ ID NO:142, SEQ ID NO:143, SEQ ID NO:144, SEQ ID NO:145, SEQ ID NO:146, SEQ ID NO:147, SEQ ID NO:148, SEQ ID NO:149, SEQ ID NO:150, SEQ ID NO:151, SEQ ID NO:152, SEQ ID NO:153, SEQ ID NO:154, SEQ ID NO:155, SEQ ID NO:156, SEQ ID NO:157, SEQ ID NO:158, SEQ ID NO:159, SEQ ID NO:160, SEQ ID NO:161, SEQ ID NO:162, SEQ ID NO:163, SEQ ID NO:164, SEQ ID NO:165. SEQ ID NO:166, SEQ ID NO:167, SEQ ID NO:168, SEQ ID NO:169, SEQ ID NO:170, SEQ ID NO:171, SEQ ID NO:172, SEQ ID NO:173, SEQ ID NO:174, SEQ ID NO:175, SEQ ID NO:176, SEQ ID NO:177, SEQ ID NO:178, SEQ ID NO:179, SEQ ID NO:180, SEQ ID NO:181, SEQ ID NO:182, SEQ ID NO:183, SEQ ID NO:184, SEQ ID NO:185, SEQ ID NO:186, SEQ ID NO:187, SEQ ID NO:188, SEQ ID NO:189, SEQ ID NO:190, SEQ ID NO:191, SEQ ID NO:199, SEQ ID NO:193, SEQ ID NO:194, SEQ ID NO:195, SEQ ID NO:196, SEQ ID NO:197, SEQ ID NO:198, SEQ ID NO:199, SEQ ID NO:200, SEQ ID NO:201, SEQ ID NO:202, SEQ ID NO:203, SEQ ID NO:204, SEQ ID NO:205, SEQ ID NO:206, SEQ ID NO:207, SEQ ID NO:208, SEQ ID NO:209, SEQ ID NO:210, SEQ ID NO:211, SEQ ID NO:212, SEQ ID NO:213, SEQ ID NO:214, SEQ ID NO:215, SEQ ID NO:216, SEQ ID NO:217, SEQ ID NO:218, SEQ ID NO:219, SEQ ID NO:220, SEQ ID NO:221, SEQ ID NO:222, SEQ ID NO:223, SEQ ID NO:224, SEQ ID NO:225, SEQ ID NO:226, SEQ ID NO:227, SEQ ID NO:228, SEQ ID NO:229, SEQ ID NO:230, SEQ ID NO:231, SEQ ID NO:232, SEQ ID NO:233, SEQ ID NO:234, SEQ ID NO:235, SEQ ID NO:236, SEQ ID NO:237, SEQ ID NO:238, SEQ ID NO:239, SEQ ID NO:240, SEQ ID NO:241, and SEQ ID NO:242A.

[0059] In some embodiments the invention includes a recombinant kinase polypeptide selected from the group consisting of SEQ ID NO:122, SEQ ID NO:123, SEQ ID NO:124, SEQ ID NO:125, SEQ ID NO:126, SEQ ID NO:127, SEQ ID NO:128, SEQ ID NO:129, SEQ ID NO:130, SEQ ID NO:131, SEQ ID NO:132, SEQ ID NO:133, SEQ ID NO:134, SEQ ID NO:135, SEQ ID NO:136, SEQ ID NO:137, SEQ ID NO:138, SEQ ID NO:139, SEQ ID NO:140, SEQ ID NO:141, SEQ ID NO:142, SEQ ID NO:143, SEQ ID NO:144, SEQ ID NO:145, SEQ ID NO:146, SEQ ID NO:147, SEQ ID NO:148, SEQ ID NO:149, SEQ ID NO:150, SEQ ID NO:151, SEQ ID NO:152, SEQ ID NO:153, SEQ ID NO:154, SEQ ID NO:155, SEQ ID NO:156, SEQ ID NO:157, SEQ ID NO:158, SEQ ID NO:159, SEQ ID NO:160, SEQ ID NO:161, SEQ ID NO:162, SEQ ID NO:163, SEQ ID NO:164, SEQ ID NO:165. SEQ ID NO:166, SEQ ID NO:167, SEQ ID NO:168, SEQ ID NO:169, SEQ ID NO:170, SEQ ID NO:171, SEQ ID NO:172, SEQ ID NO:173, SEQ ID NO:174, SEQ ID NO:175, SEQ ID NO:176, SEQ ID NO:177, SEQ ID NO:178, SEQ ID NO:179, SEQ ID NO:180, SEQ ID NO:181, SEQ ID NO:182, SEQ ID NO:183, SEQ ID NO:184, SEQ ID NO:185, SEQ ID NO:186, SEQ ID NO:187, SEQ ID NO:188, SEQ ID NO:189, SEQ ID NO:190, SEQ ID NO:191, SEQ ID NO:199, SEQ ID NO:193, SEQ ID NO:194, SEQ ID NO:195, SEQ ID NO:196, SEQ ID NO:197, SEQ ID NO:198, SEQ ID NO:199, SEQ ID NO:200, SEQ ID NO:201, SEQ ID NO:202, SEQ ID NO:203, SEQ ID NO:204, SEQ ID NO:205, SEQ ID NO:206, SEQ ID NO:207, SEQ ID NO:208, SEQ ID NO:209, SEQ ID NO:210, SEQ ID NO:211, SEQ ID NO:212, SEQ ID NO:213, SEQ ID NO:214, SEQ ID NO:215, SEQ ID NO:216, SEQ ID NO:217, SEQ ID NO:218, SEQ ID NO:219, SEQ ID NO:220, SEQ ID NO:221, SEQ ID NO:222, SEQ ID NO:223, SEQ ID NO:224, SEQ ID NO:225, SEQ ID NO:226, SEQ ID NO:227, SEQ ID NO:228, SEQ ID NO:229, SEQ ID NO:230, SEQ ID NO:231, SEQ ID NO:232, SEQ ID NO:233, SEQ ID NO:234, SEQ ID NO:235, SEQ ID NO:236, SEQ ID NO:237, SEQ ID NO:238, SEQ ID NO:239, SEQ ID NO:240, SEQ ID NO:241, and SEQ ID NO:242. By “recombinant kinase polypeptide” is meant a polypeptide produced by recombinant DNA techniques such that it is distinct from a naturally occurring polypeptide either in its location (e.g., present in a different cell or tissue than found in nature), purity or structure. Generally, such a recombinant polypeptide will be present in a cell in an amount different from that normally observed in nature.

[0060] In a fifth aspect, the invention features an antibody (e.g., a monoclonal or polyclonal antibody) having specific binding affinity to a kinase polypeptide or a kinase polypeptide domain or fragment where the polypeptide is selected from the group consisting of SEQ ID NO:122, SEQ ID NO:123, SEQ ID NO:124, SEQ ID NO:125, SEQ ID NO:126, SEQ ID NO:127, SEQ ID NO:128, SEQ ID NO:129, SEQ ID NO:130, SEQ ID NO:131, SEQ ID NO:132, SEQ ID NO:133, SEQ ID NO:134, SEQ ID NO:135, SEQ I) NO:136, SEQ ID NO:137, SEQ ID NO:138, SEQ ID NO:139, SEQ ID NO:140, SEQ ID NO:141, SEQ ID NO:142, SEQ ID NO:143, SEQ ID NO:144, SEQ ID NO:145, SEQ ID NO:146, SEQ ID NO:147, SEQ ID NO:148, SEQ ID NO:149, SEQ ID NO:150, SEQ ID NO:151, SEQ ID NO:152, SEQ ID NO:153, SEQ ID NO:154, SEQ ID NO:155, SEQ ID NO:156, SEQ ID NO:157, SEQ ID NO:158, SEQ ID NO:159, SEQ ID NO:160, SEQ ID NO:161, SEQ ID NO:162, SEQ ID NO:163, SEQ ID NO:164, SEQ ID NO:165. SEQ ID NO:166, SEQ ID NO:167, SEQ ID NO:168, SEQ ID NO:169, SEQ ID NO:170, SEQ ID NO:171, SEQ ID NO:172, SEQ ID NO:173, SEQ ID NO:174, SEQ ID NO:175, SEQ ID NO:176, SEQ ID NO:177, SEQ ID NO:178, SEQ ID NO:179, SEQ ID NO:180, SEQ ID NO:181, SEQ ID NO:182, SEQ ID NO:183, SEQ ID NO:184, SEQ ID NO:185, SEQ ID NO:186, SEQ ID NO:187, SEQ ID NO:188, SEQ ID NO:189, SEQ ID NO:190, SEQ ID NO:191, SEQ ID NO:199, SEQ ID NO:193, SEQ ID NO:194, SEQ ID NO:195, SEQ ID NO:196, SEQ ID NO:197, SEQ ID NO:198, SEQ ID NO:199, SEQ ID NO:200, SEQ ID NO:201, SEQ ID NO:202, SEQ ID NO:203, SEQ ID NO:204, SEQ ID NO:205, SEQ ID NO:206, SEQ ID NO:207, SEQ ID NO:208, SEQ ID NO:209, SEQ ID NO:210, SEQ ID NO:211, SEQ ID NO:212, SEQ ID NO:213, SEQ ID NO:214, SEQ ID NO:215, SEQ ID NO:216, SEQ ID NO:217, SEQ ID NO:218, SEQ ID NO:219, SEQ ID NO:220, SEQ ID NO:221, SEQ ID NO:222, SEQ ID NO:223, SEQ ID NO:224, SEQ ID NO:225, SEQ ID NO:226, SEQ ID NO:227, SEQ ID NO:228, SEQ ID NO:229, SEQ ID NO:230, SEQ ID NO:231, SEQ ID NO:232, SEQ ID NO:233, SEQ ID NO:234, SEQ ID NO:235, SEQ ID NO:236, SEQ ID NO:237, SEQ ID NO:238, SEQ ID NO:239, SEQ ID NO:240, SEQ ID NO:241, and SEQ ID NO:242. In preferred embodiments, the antibody binds specifically to domains of kinase polypeptides, that are defined supra.

[0061] By “specific binding affinity” is meant that the antibody binds to the target kinase polypeptide with greater affinity than it binds to other polypeptides under specified conditions. Antibodies or antibody fragments are polypeptides that contain regions that can bind other polypeptides. The term “specific binding affinity” describes an antibody that binds to a kinase polypeptide with greater affinity than it binds to other polypeptides under specified conditions.

[0062] The term “polyclonal” refers to antibodies that are heterogenous populations of antibody molecules derived from the sera of animals immunized with an antigen or an antigenic functional derivative thereof For the production of polyclonal antibodies, various host animals may be immunized by injection with the antigen. Various adjuvants may be used to increase the immunological response, depending on the host species.

[0063] “Monoclonal antibodies” are substantially homogenous populations of antibodies to a particular antigen. They may be obtained by any technique which provides for the production of antibody molecules by continuous cell lines in culture. Monoclonal antibodies may be obtained by methods known to those skilled in the art (Kohler et al., Nature 256:495-497, 1975, and U.S. Pat. No. 4,376,110, both of which are hereby incorporated by reference herein in their entirety including any figures, tables, or drawings).

[0064] The term “antibody fragment” refers to a portion of an antibody, often the hyper variable region and portions of the surrounding heavy and light chains, that displays specific binding affinity for a particular molecule. A hyper variable region is a portion of an antibody that physically binds to the polypeptide target.

[0065] Antibodies or antibody fragments having specific binding affinity to a kinase polypeptide or domains of a kinase polypeptide of the invention may be used in methods for detecting the presence and/or amount of kinase polypeptide in a sample by probing the sample with the antibody under conditions suitable for kinase-antibody immunocomplex formation and detecting the presence and/or amount of the antibody conjugated to the kinase polypeptide. Diagnostic kits for performing such methods may be constructed to include antibodies or antibody fragments specific for the kinase as well as a conjugate of a binding partner of the antibodies or the antibodies themselves.

[0066] An antibody or antibody fragment with specific binding affinity to a kinase polypeptide of the invention can be isolated, enriched, or purified from a prokaryotic or eukaryotic organism. Routine methods known to those skilled in the art enable production of antibodies or antibody fragments, in both prokaryotic and eukaryotic organisms. Purification, enrichment, and isolation of antibodies, which are polypeptide molecules, are described above.

[0067] Antibodies having specific binding affinity to a kinase polypeptide of the invention may be used in methods for detecting the presence and/or amount of kinase polypeptide in a sample by contacting the sample with the antibody under conditions such that an immunocomplex forms and detecting the presence and/or amount of the antibody conjugated to the kinase polypeptide. Diagnostic kits for performing such methods may be constructed to include a first container containing the antibody and a second container having a conjugate of a binding partner of the antibody and a label, such as, for example, a radioisotope. The diagnostic kit may also include notification of an FDA approved use and instructions therefor.

[0068] In a sixth aspect, the invention features a hybridoma which produces an antibody having specific binding affinity to a kinase polypeptide or a kinase polypeptide domain, where the polypeptide is selected from the group consisting of SEQ ID NO:122, SEQ ID NO:123, SEQ ID NO:124, SEQ ID NO:125, SEQ ID NO:126, SEQ ID NO:127, SEQ ID NO:128, SEQ ID NO:129, SEQ ID NO:130, SEQ ID NO:131, SEQ ID NO:132, SEQ ID NO:133, SEQ ID NO:134, SEQ ID NO:135, SEQ ID NO:136, SEQ ID NO:137, SEQ ID NO:138, SEQ ID NO:139, SEQ ID NO:140, SEQ ID NO:141, SEQ ID NO:142, SEQ ID NO:143, SEQ ID NO:144, SEQ ID NO:145, SEQ ID NO:146, SEQ ID NO:147, SEQ ID NO:148, SEQ ID NO:149, SEQ ID NO:150, SEQ ID NO:151, SEQ ID NO:152, SEQ ID NO:153, SEQ ID NO:154, SEQ ID NO:155, SEQ ID NO:156, SEQ ID NO:157, SEQ ID NO:158, SEQ ID NO:159, SEQ ID NO:160, SEQ ID NO:161, SEQ ID NO:162, SEQ ID NO:163, SEQ ID NO:164, SEQ ID NO:165. SEQ ID NO:166, SEQ ID NO:167, SEQ ID NO:168, SEQ ID NO:169, SEQ ID NO:170, SEQ ID NO:171, SEQ ID NO:172, SEQ ID NO:173, SEQ ID NO:174, SEQ ID NO:175, SEQ ID NO:176, SEQ ID NO:177, SEQ ID NO:178, SEQ ID NO:179, SEQ ID NO:180, SEQ ID NO:181, SEQ ID NO:182, SEQ ID NO:183, SEQ ID NO:184, SEQ ID NO:185, SEQ ID NO:186, SEQ ID NO:187, SEQ ID NO:188, SEQ ID NO:189, SEQ ID NO:190, SEQ ID NO:191, SEQ ID NO:199, SEQ ID NO:193, SEQ ID NO:194, SEQ ID NO:195, SEQ ID NO:196, SEQ ID NO:197, SEQ ID NO:198, SEQ ID NO:199, SEQ ID NO:200, SEQ ID NO:201, SEQ ID NO:202, SEQ ID NO:203, SEQ ID NO:204, SEQ ID NO:205, SEQ ID NO:206, SEQ ID NO:207, SEQ ID NO:208, SEQ ID NO:209, SEQ ID NO:210, SEQ ID NO:211, SEQ ID NO:212, SEQ ID NO:213, SEQ ID NO:214, SEQ ID NO:215, SEQ ID NO:216, SEQ ID NO:217, SEQ ID NO:218, SEQ ID NO:219, SEQ ID NO:220, SEQ ID NO:221, SEQ ID NO:222, SEQ ID NO:223, SEQ ID NO:224, SEQ ID NO:225, SEQ ID NO:226, SEQ ID NO:227, SEQ ID NO:228, SEQ ID NO:229, SEQ ID NO:230, SEQ ID NO:231, SEQ ID NO:232, SEQ ID NO:233, SEQ ID NO:234, SEQ ID NO:235, SEQ ID NO:236, SEQ ID NO:237, SEQ ID NO:238, SEQ ID NO:239, SEQ ID NO:240, SEQ ID NO:241, and SEQ ID NO:242; and where the domains are defined as above. By “hybridoma” is meant an immortalized cell line that is capable of secreting an antibody, for example an antibody to a kinase of the invention. In preferred embodiments, the antibody to the kinase comprises a sequence of amino acids that is able to specifically bind a kinase polypeptide of the invention.

[0069] In a seventh aspect, the invention features a kinase polypeptide binding agent able to bind to a kinase polypeptide selected from the group consisting of SEQ ID NO:122, SEQ ID NO:123, SEQ ID NO:124, SEQ ID NO:125, SEQ ID NO:126, SEQ ID NO:127, SEQ ID NO:128, SEQ ID NO:129, SEQ ID NO:130, SEQ ID NO:131, SEQ ID NO:132, SEQ ID NO:133, SEQ ID NO:134, SEQ ID NO:135, SEQ ID NO:136, SEQ ID NO:137, SEQ ID NO:138, SEQ ID NO:139, SEQ ID NO:140, SEQ ID NO:141, SEQ ID NO:142, SEQ ID NO:143, SEQ ID NO:144, SEQ ID NO:145, SEQ ID NO:146, SEQ ID NO:147, SEQ ID NO:148, SEQ ID NO:149, SEQ ID NO:150, SEQ ID NO:151, SEQ ID NO:152, SEQ ID NO:153, SEQ ID NO:154, SEQ ID NO:155, SEQ ID NO:156, SEQ ID NO:157, SEQ ID NO:158, SEQ ID NO:159, SEQ ID NO:160, SEQ ID NO:161, SEQ ID NO:162, SEQ ID NO:163, SEQ ID NO:164, SEQ ID NO:165. SEQ ID NO:166, SEQ ID NO:167, SEQ ID NO:168, SEQ ID NO:169, SEQ ID NO:170, SEQ ID NO:171, SEQ ID NO:172, SEQ ID NO:173, SEQ ID NO:174, SEQ ID NO:175, SEQ ID NO:176, SEQ ID NO:177, SEQ ID NO:178, SEQ ID NO:179, SEQ ID NO:180, SEQ ID NO:181, SEQ ID NO:182, SEQ ID NO:183, SEQ ID NO:184, SEQ ID NO:185, SEQ ID NO:186, SEQ ID NO:187, SEQ ID NO:188, SEQ ID NO:189, SEQ ID NO:190, SEQ ID NO:191, SEQ ID NO:199, SEQ ID NO:193, SEQ ID NO:194, SEQ ID NO:195, SEQ ID NO:196, SEQ ID NO:197, SEQ ID NO:198, SEQ ID NO:199, SEQ ID NO:200, SEQ ID NO:201, SEQ ID NO:202, SEQ ID NO:203, SEQ ID NO:204, SEQ ID NO:205, SEQ ID NO:206, SEQ ID NO:207, SEQ ID NO:208, SEQ ID NO:209, SEQ ID NO:210, SEQ ID NO:211, SEQ ID NO:212, SEQ ID NO:213, SEQ ID NO:214, SEQ ID NO:215, SEQ ID NO:216, SEQ ID NO:217, SEQ ID NO:218, SEQ ID NO:219, SEQ ID NO:220, SEQ ID NO:221, SEQ ID NO:222, SEQ ID NO:223, SEQ ID NO:224, SEQ ID NO:225, SEQ ID NO:226, SEQ ID NO:227, SEQ ID NO:228, SEQ ID NO:229, SEQ ID NO:230, SEQ ID NO:231, SEQ ID NO:232, SEQ ID NO:233, SEQ ID NO:234, SEQ ID NO:235, SEQ ID NO:236, SEQ ID NO:237, SEQ ID NO:238, SEQ ID NO:239, SEQ ID NO:240, SEQ ID NO:241, and SEQ ID NO:242. The binding agent is preferably a purified antibody that recognizes an epitope present on a kinase polypeptide of the invention. Other binding agents include molecules that bind to kinase polypeptides and analogous molecules that bind to a kinase polypeptide. Such binding agents may be identified by using assays that measure kinase binding partner activity, such as those that measure PDGFR activity.

[0070] The invention also features a method for screening for human cells containing a kinase polypeptide of the invention or an equivalent sequence. The method involves identifying the novel polypeptide in human cells using techniques that are routine and standard in the art, such as those described herein for identifying the kinases of the invention (e.g., cloning, Southern or Northern blot analysis, in situ hybridization, PCR amplification, etc.).

[0071] In an eighth aspect, the invention features methods for identifying a substance that modulates kinase activity comprising the steps of: (a) contacting a kinase polypeptide selected from the group consisting of SEQ ID NO:122, SEQ ID NO:123, SEQ ID NO:124, SEQ ID NO:125, SEQ ID NO:126, SEQ ID NO:127, SEQ ID NO:128, SEQ ID NO:129, SEQ ID NO:130, SEQ ID NO:131, SEQ ID NO:132, SEQ ID NO:133, SEQ ID NO:134, SEQ ID NO:135, SEQ ID NO:136, SEQ ID NO:137, SEQ ID NO:138, SEQ ID NO:139, SEQ ID NO:140, SEQ ID NO:141, SEQ ID NO:142, SEQ ID NO:143, SEQ ID NO:144, SEQ ID NO:145, SEQ ID NO:146, SEQ ID NO:147, SEQ ID NO:148, SEQ ID NO:149, SEQ ID NO:150, SEQ ID NO:151, SEQ ID NO:152, SEQ ID NO:153, SEQ ID NO:154, SEQ ID NO:155, SEQ ID NO:156, SEQ ID NO:157, SEQ ID NO:158, SEQ ID NO:159, SEQ ID NO:160, SEQ ID NO:161, SEQ ID NO:162, SEQ ID NO:163, SEQ ID NO:164, SEQ ID NO:165. SEQ ID NO:166, SEQ ID NO:167, SEQ ID NO:168, SEQ ID NO:169, SEQ ID NO:170, SEQ ID NO:171, SEQ ID NO:172, SEQ ID NO:173, SEQ ID NO:174, SEQ ID NO:175, SEQ ID NO:176, SEQ ID NO:177, SEQ ID NO:178, SEQ ID NO:179, SEQ ID NO:180, SEQ ID NO:181, SEQ ID NO:182, SEQ ID NO:183, SEQ ID NO:184, SEQ ID NO:185, SEQ ID NO:186, SEQ ID NO:187, SEQ ID NO:188, SEQ ID NO:189, SEQ ID NO:190, SEQ ID NO:191, SEQ ID NO:199, SEQ ID NO:193, SEQ ID NO:194, SEQ ID NO:195, SEQ ID NO:196, SEQ ID NO:197, SEQ ID NO:198, SEQ ID NO:199, SEQ ID NO:200, SEQ ID NO:201, SEQ ID NO:202, SEQ ID NO:203, SEQ ID NO:204, SEQ ID NO:205, SEQ ID NO:206, SEQ ID NO:207, SEQ ID NO:208, SEQ ID NO:209, SEQ ID NO:210, SEQ ID NO:211, SEQ ID NO:212, SEQ ID NO:213, SEQ ID NO:214, SEQ ID NO:215, SEQ ID NO:216, SEQ ID NO:217, SEQ ID NO:218, SEQ ID NO:219, SEQ ID NO:220, SEQ ID NO:221, SEQ ID NO:222, SEQ ID NO:223, SEQ ID NO:224, SEQ ID NO:225, SEQ ID NO:226, SEQ ID NO:227, SEQ ID NO:228, SEQ ID NO:229, SEQ ID NO:230, SEQ ID NO:231, SEQ ID NO:232, SEQ ID NO:233, SEQ ID NO:234, SEQ ID NO:235, SEQ ID NO:236, SEQ ID NO:237, SEQ ID NO:238, SEQ ID NO:239, SEQ ID NO:240, SEQ ID NO:241, and SEQ ID NO:242 with a test substance; (b) measuring the activity of said polypeptide; and (c) determining whether said substance modulates the activity of said polypeptide.

[0072] The term “modulates” refers to the ability of a compound to alter the function of a kinase of the invention. A modulator preferably activates or inhibits the activity of a kinase of the invention.

[0073] The term “activates” refers to increasing the cellular activity of the kinase. The term inhibit refers to decreasing the cellular activity of the kinase. Kinase activity is preferably the interaction with a natural binding partner.

[0074] The term “modulates” also refers to altering the function of kinases of the invention by increasing or decreasing the probability that a complex forms between the kinase and a natural binding partner. A modulator preferably increases the probability that such a complex forms between the kinase and the natural binding partner, more preferably increases or decreases the probability that a complex forms between the kinase and the natural binding partner depending on the concentration of the compound exposed to the kinase, and most preferably decreases the probability that a complex forms between the kinase and the natural binding partner.

[0075] The term “complex” refers to an assembly of at least two molecules bound to one another. Signal transduction complexes often contain at least two protein molecules bound to one another. For instance, a protein tyrosine receptor protein kinase, GRB2, SOS, RAF, and RAS assemble to form a signal transduction complex in response to a mitogenic ligand.

[0076] The term “natural binding partner” refers to polypeptides, lipids, small molecules, or nucleic acids that bind to kinases in cells. A change in the interaction between a kinase and a natural binding partner can manifest itself as an increased or decreased probability that the interaction forms, or an increased or decreased concentration of kinase/natural binding partner complex.

[0077] The term “contacting” as used herein refers to mixing a solution comprising the test compound with a liquid medium bathing the cells of the methods. The solution comprising the compound may also comprise another component, such as dimethyl sulfoxide (DMSO), which facilitates the uptake of the test compound or compounds into the cells of the methods. The solution comprising the test compound may be added to the medium bathing the cells by utilizing a delivery apparatus, such as a pipet-based device or syringe-based device.

[0078] In a ninth aspect, the invention features methods for identifying a substance that modulates kinase activity in a cell comprising the steps of: (a) expressing a kinase polypeptide in a cell, wherein said polypeptide is selected from the group consisting of SEQ ID NO:122, SEQ ID NO:123, SEQ ID NO:124, SEQ ID NO:125, SEQ ID NO:126, SEQ ID NO:127, SEQ ID NO:128, SEQ ID NO:129, SEQ ID NO:130, SEQ ID NO:131, SEQ ID NO:132, SEQ ID NO:133, SEQ ID NO:134, SEQ ID NO:135, SEQ ID NO:136, SEQ ID NO:137, SEQ ID NO:138, SEQ ID NO:139, SEQ ID NO:140, SEQ ID NO:141, SEQ ID NO:142, SEQ ID NO:143, SEQ ID NO:144, SEQ ID NO:145, SEQ ID NO:146, SEQ ID NO:147, SEQ ID NO:148, SEQ ID NO:149, SEQ ID NO:150, SEQ ID NO:151, SEQ ID NO:152, SEQ ID NO:153, SEQ ID NO:154, SEQ ID NO:155, SEQ ID NO:156, SEQ ID NO:157, SEQ ID NO:158, SEQ ID NO:159, SEQ ID NO:160, SEQ ID NO:161, SEQ ID NO:162, SEQ ID NO:163, SEQ ID NO:164, SEQ ID NO:165. SEQ ID NO:166, SEQ ID NO:167, SEQ ID NO:168, SEQ ID NO:169, SEQ ID NO:170, SEQ ID NO:171, SEQ ID NO:172, SEQ ID NO:173, SEQ ID NO:174, SEQ ID NO:175, SEQ ID NO:176, SEQ ID NO:177, SEQ ID NO:178, SEQ ID NO:179, SEQ ID NO:180, SEQ ID NO:181, SEQ ID NO:182, SEQ ID NO:183, SEQ ID NO:184, SEQ ID NO:185, SEQ ID NO:186, SEQ ID NO:187, SEQ ID NO:188, SEQ ID NO:189, SEQ ID NO:190, SEQ ID NO:191, SEQ ID NO:199, SEQ ID NO:193, SEQ ID NO:194, SEQ ID NO:195, SEQ ID NO:196, SEQ ID NO:197, SEQ ID NO:198, SEQ ID NO:199, SEQ ID NO:200, SEQ ID NO:201, SEQ ID NO:202, SEQ ID NO:203, SEQ ID NO:204, SEQ ID NO:205, SEQ ID NO:206, SEQ ID NO:207, SEQ ID NO:208, SEQ ID NO:209, SEQ ID NO:210, SEQ ID NO:211, SEQ ID NO:212, SEQ ID NO:213, SEQ ID NO:214, SEQ ID NO:215, SEQ ID NO:216, SEQ ID NO:217, SEQ ID NO:218, SEQ ID NO:219, SEQ ID NO:220, SEQ ID NO:221, SEQ ID NO:222, SEQ ID NO:223, SEQ ID NO:224, SEQ ID NO:225, SEQ ID NO:226, SEQ ID NO:227, SEQ ID NO:228, SEQ ID NO:229, SEQ ID NO:230, SEQ ID NO:231, SEQ ID NO:232, SEQ ID NO:233, SEQ ID NO:234, SEQ ID NO:235, SEQ ID NO:236, SEQ ID NO:237, SEQ ID NO:238, SEQ ID NO:239, SEQ ID NO:240, SEQ ID NO:241, and SEQ ID NO:242; (b) adding a test substance to said cell; and (c) monitoring a change in cell phenotype or the interaction between said polypeptide and a natural binding partner.

[0079] The term “expressing” as used herein refers to the production of kinases of the invention from a nucleic acid vector containing kinase genes within a cell. The nucleic acid vector is transfected into cells using well known techniques in the art as described herein.

[0080] In a tenth aspect, the invention provides methods for treating a disease or abnormal condition by administering to a patient in need of such treatment a substance that modulates the activity of a polypeptide selected from the group consisting of SEQ ID NO:122, SEQ ID NO:123, SEQ ID NO:124, SEQ ID NO:125, SEQ ID NO:126, SEQ ID NO:127, SEQ ID NO:128, SEQ ID NO:129, SEQ ID NO:130, SEQ ID NO:131, SEQ ID NO:132, SEQ ID NO:133, SEQ ID NO:134, SEQ ID NO:135, SEQ ID NO:136, SEQ ID NO:137, SEQ ID NO:138, SEQ ID NO:139, SEQ ID NO:140, SEQ ID NO:141, SEQ ID NO:142, SEQ ID NO:143, SEQ ID NO:144, SEQ ID NO:145, SEQ ID NO:146, SEQ ID NO:147, SEQ ID NO:148, SEQ ID NO:149, SEQ ID NO:150, SEQ ID NO:151, SEQ ID NO:152, SEQ ID NO:153, SEQ ID NO:154, SEQ ID NO:155, SEQ ID NO:156, SEQ ID NO:157, SEQ ID NO:158, SEQ ID NO:159, SEQ ID NO:160, SEQ ID NO:161, SEQ ID NO:162, SEQ ID NO:163, SEQ ID NO:164, SEQ ID NO:165. SEQ ID NO:166, SEQ ID NO:167, SEQ ID NO:168, SEQ ID NO:169, SEQ ID NO:170, SEQ ID NO:171, SEQ ID NO:172, SEQ ID NO:173, SEQ ID NO:174, SEQ ID NO:175, SEQ ID NO:176, SEQ ID NO:177, SEQ ID NO:178, SEQ ID NO:179, SEQ ID NO:180, SEQ ID NO:181, SEQ ID NO:182, SEQ ID NO:183, SEQ ID NO:184, SEQ ID NO:185, SEQ ID NO:186, SEQ ID NO:187, SEQ ID NO:188, SEQ ID NO:189, SEQ ID NO:190, SEQ ID NO:191, SEQ ID NO:199, SEQ ID NO:193, SEQ ID NO:194, SEQ ID NO:195, SEQ ID NO:196, SEQ ID NO:197, SEQ ID NO:198, SEQ ID NO:199, SEQ ID NO:200, SEQ ID NO:201, SEQ ID NO:202, SEQ ID NO:203, SEQ ID NO:204, SEQ ID NO:205, SEQ ID NO:206, SEQ ID NO:207, SEQ ID NO:208, SEQ ID NO:209, SEQ ID NO:210, SEQ ID NO:211, SEQ ID NO:212, SEQ ID NO:213, SEQ ID NO:214, SEQ ID NO:215, SEQ ID NO:216, SEQ ID NO:217, SEQ ID NO:218, SEQ ID NO:219, SEQ ID NO:220, SEQ ID NO:221, SEQ ID NO:222, SEQ ID NO:223, SEQ ID NO:224, SEQ ID NO:225, SEQ ID NO:226, SEQ ID NO:227, SEQ ID NO:228, SEQ ID NO:229, SEQ ID NO:230, SEQ ID NO:231, SEQ ID NO:232, SEQ ID NO:233, SEQ ID NO:234, SEQ ID NO:235, SEQ ID NO:236, SEQ ID NO:237, SEQ ID NO:238, SEQ ID NO:239, SEQ ID NO:240, SEQ ID NO:241, and SEQ ID NO:242. Preferably, the disease is selected from the group consisting of immune-related diseases and disorders, cardiovascular disease, neurodegenerative disorders, and cancer. Also included are metabolic disorders, such as diabetes mellitus, and reproductive disorders, such as infertility.

[0081] Preferably, the disease or disorder is selected from the group consisting of rheumatoid arthritis, artherosclerosis, autoimmune disorders, and organ transplantation. Preferably the disease or disorder is selected from the group consisting of immune-related diseases and disorders, myocardial infarction, cardiomyopathies, stroke, renal failure, and oxidative stress-related neurodegenerative disorders. Most preferably, the immune-related diseases and disorders are selected from the group consisting of rheumatoid arthritis, chronic inflammatory bowel disease, chronic inflammatory pelvic disease, multiple sclerosis, asthma, osteoarthritis, psoriasis, atherosclerosis, rhinitis, autoimmunity, and organ transplantation.

[0082] Substances useful for treatment of disorders or diseases preferably show positive results in one or more in vitro assays for an activity corresponding to treatment of the disease or disorder in question Substances that modulate the activity of the polypeptides preferably include, but are not limited to, antisense oligonucleotides and inhibitors of protein kinases.

[0083] The term “preventing” refers to decreasing the probability that an organism contracts or develops an abnormal condition.

[0084] The term “treating” refers to having a therapeutic effect and at least partially alleviating or abrogating an abnormal condition in the organism.

[0085] The term “therapeutic effect” refers to the inhibition or activation factors causing or contributing to the abnormal condition. A therapeutic effect relieves to some extent one or more of the symptoms of the abnormal condition. In reference to the treatment of abnormal conditions, a therapeutic effect can refer to one or more of the following: (a) an increase in the proliferation, growth, and/or differentiation of cells; (b) inhibition (i.e., slowing or stopping) of cell death; (c) inhibition of degeneration; (d) relieving to some extent one or more of the symptoms associated with the abnormal condition; and (e) enhancing the function of the affected population of cells. Compounds demonstrating efficacy against abnormal conditions can be identified as described herein.

[0086] The term “abnormal condition” refers to a function in the cells or tissues of an organism that deviates from their normal functions in that organism. An abnormal condition can relate to cell proliferation, cell differentiation or cell survival. An abnormal condition may also include irregularities in cell cycle progression, i.e., irregularities in normal cell cycle progression through mitosis and meiosis.

[0087] Abnormal cell proliferative conditions include cancers such as fibrotic and mesangial disorders, abnormal angiogenesis and vasculogenesis, wound healing, psoriasis, diabetes mellitus, and inflammation.

[0088] Abnormal differentiation conditions include, but are not limited to neurodegenerative disorders, slow wound healing rates, and slow tissue grafting healing rates.

[0089] Abnormal cell survival conditions relate to conditions in which programmed cell death (apoptosis) pathways are activated or abrogated. A number of protein kinases are associated with the apoptosis pathways. Aberrations in the function of any one of the protein kinases could lead to cell immortality or premature cell death.

[0090] The tern “aberration”, in conjunction with the function of a kinase in a signal transduction process, refers to a kinase that is over- or under-expressed in an organism, mutated such that its catalytic activity is lower or higher than wild-type protein kinase activity, mutated such that it can no longer interact with a natural binding partner, is no longer modified by another protein kinase or protein phosphatase, or no longer interacts with a natural binding partner.

[0091] The term “administering” relates to a method of incorporating a compound into cells or tissues of an organism. The abnormal condition can be prevented or treated when the cells or tissues of the organism exist within the organism or outside of the organism. Cells existing outside the organism can be maintained or grown in cell culture dishes. For cells harbored within the organism, many techniques exist in the art to administer compounds, including (but not limited to) oral parenteral, dermal, injection, and aerosol applications. For cells outside of the organism, multiple techniques exist in the art to administer the compounds, including (but not limited to) cell microinjection techniques, transformation techniques, and carrier techniques.

[0092] The abnormal condition can also be prevented or treated by administering a compound to a group of cells having an aberration in a signal transduction pathway to an organism. The effect of administering a compound on organism function can then-be monitored. The organism is preferably a mouse, rat, rabbit, guinea pig, or goat, more preferably a monkey or ape, and most preferably a human.

[0093] In an eleventh aspect, the invention features methods for detection the expression of a polypeptide in a sample as a diagnostic tool for diseases or disorders, wherein the method comprises the steps of: (a) contacting the sample with a nucleic acid probe which hybridizes under hybridization assay conditions to a nucleic acid target region of a kinase polypeptide selected from the group consisting of SEQ ID NO:122, SEQ ID NO:123, SEQ ID NO:124, SEQ ID NO:125, SEQ ID NO:126, SEQ ID NO:127, SEQ ID NO:128, SEQ ID NO:129, SEQ ID NO:130, SEQ ID NO:131, SEQ ID NO:132, SEQ ID NO:133, SEQ ID NO:134, SEQ ID NO:135, SEQ ID NO:136, SEQ ID NO:137, SEQ ID NO:138, SEQ ID NO:139, SEQ ID NO:140, SEQ ID NO:141, SEQ ID NO:142, SEQ ID NO:143, SEQ ID NO:144, SEQ ID NO:145, SEQ ID NO:146, SEQ ID NO:147, SEQ ID NO:148, SEQ ID NO:149, SEQ ID NO:150, SEQ ID NO:151, SEQ ID NO:152, SEQ ID NO:153, SEQ ID NO:154, SEQ ID NO:155, SEQ ID NO:156, SEQ ID NO:157, SEQ ID NO:158, SEQ ID NO:159, SEQ ID NO:160, SEQ ID NO:161, SEQ ID NO:162, SEQ ID NO:163, SEQ ID NO:164, SEQ ID NO:165. SEQ ID NO:166, SEQ ID NO:167, SEQ ID NO:168, SEQ ID NO:169, SEQ ID NO:170, SEQ ID NO:171, SEQ ID NO:172, SEQ ID NO:173, SEQ ID NO:174, SEQ ID NO:175, SEQ ID NO:176, SEQ ID NO:177, SEQ ID NO:178, SEQ ID NO:179, SEQ ID NO:180, SEQ ID NO:181, SEQ ID NO:182, SEQ ID NO:183, SEQ ID NO:184, SEQ ID NO:185, SEQ ID NO:186, SEQ ID NO:187, SEQ ID NO:188, SEQ ID NO:189, SEQ ID NO:190, SEQ ID NO:191, SEQ ID NO:199, SEQ ID NO:193, SEQ ID NO:194, SEQ ID NO:195, SEQ ID NO:196, SEQ ID NO:197, SEQ ID NO:198, SEQ ID NO:199, SEQ ID NO:200, SEQ ID NO:201, SEQ ID NO:202, SEQ ID NO:203, SEQ ID NO:204, SEQ ID NO:205, SEQ ID NO:206, SEQ ID NO:207, SEQ ID NO:208, SEQ ID NO:209, SEQ ID NO:210, SEQ ID NO:211, SEQ ID NO:212, SEQ ID NO:213, SEQ ID NO:214, SEQ ID NO:215, SEQ ID NO:216, SEQ ID NO:217, SEQ ID NO:218, SEQ ID NO:219, SEQ ID NO:220, SEQ ID NO:221, SEQ ID NO:222, SEQ ID NO:223, SEQ ID NO:224, SEQ ID NO:225, SEQ ID NO:226, SEQ ID NO:227, SEQ ID NO:228, SEQ ID NO:229, SEQ ID NO:230, SEQ ID NO:231, SEQ ID NO:232, SEQ ID NO:233, SEQ ID NO:234, SEQ ID NO:235, SEQ ID NO:236, SEQ ID NO:237, SEQ ID NO:238, SEQ ID NO:239, SEQ ID NO:240, SEQ ID NO:241, and SEQ ID NO:242, said probe comprising the nucleic acid sequence encoding the polypeptide, fragments thereof, and the complements of the sequences and fragments; and (b) detecting the presence or amount of the probe:target region hybrid as an indication of the disease.

[0094] In preferred embodiments of the invention, the disease or disorder is selected from the group consisting of rheumatoid arthritis, artherosclerosis, autoimmune disorders, organ transplantation, myocardial infarction, cardiomyopathies, stroke, renal failure, oxidative stress-related neurodegenerative disorders, metabolic disorder including diabetes, reproductive disorders including infertility, and cancer.

[0095] The kinase “target region” is a nucleotide base sequence selected from the group consisting of those set forth in SEQ ID NO:1, SEQ ID NO:2, SEQ ID NO:3, SEQ ID NO:4, SEQ ID NO:5, SEQ ID NO:6, SEQ ID NO:7, SEQ ID NO:8, SEQ ID NO:9, SEQ ID NO:10, SEQ ID NO:l 1, SEQ ID NO:12, SEQ ID NO:13, SEQ ID NO:14, SEQ ID NO:15, SEQ ID NO:16, SEQ ID NO:17, SEQ ID NO:18, SEQ ID NO:19, SEQ ID NO:20, SEQ ID NO:21, SEQ ID NO:22, SEQ ID NO:23, SEQ ID NO:24, SEQ ID NO:25, SEQ ID NO:26, SEQ ID NO:27, SEQ ID NO:28, SEQ ID NO:29, SEQ ID NO:30, SEQ ID NO:31, SEQ ID NO:32, SEQ ID NO:33, SEQ ID NO:34, SEQ ID NO:35, SEQ ID NO:36, SEQ ID NO:37, SEQ ID NO:38, SEQ ID NO:39, SEQ ID NO:40, SEQ ID NO:41, SEQ ID NO:42, SEQ ID NO:43, SEQ ID NO:44, SEQ ID NO:45, SEQ ID NO:46, SEQ ID NO:47, SEQ ID NO:48, SEQ ID NO:49, SEQ ID NO:50, SEQ ID NO:51, SEQ ID NO:52, SEQ ID NO:53, SEQ ID NO:54, SEQ ID NO:55, SEQ ID NO:56, SEQ ID NO:57, SEQ ID NO:58, SEQ ID NO:59, SEQ ID NO:60, SEQ ID NO:61, SEQ ID NO:62, SEQ ID NO:63, SEQ ID NO:64, SEQ ID NO:65, SEQ ID NO:66, SEQ ID NO:67, SEQ ID NO:68, SEQ ID NO:69, SEQ ID NO:70, SEQ ID NO:71, SEQ ID NO:72, SEQ ID NO:73, SEQ ID NO:74, SEQ ID NO:75, SEQ ID NO:76, SEQ ID NO:77, SEQ ID NO:78, SEQ ID NO:79, SEQ ID NO:80, SEQ ID NO:81, SEQ ID NO:82, SEQ ID NO:83, SEQ ID NO:84, SEQ ID NO:85, SEQ ID NO:86, SEQ ID NO:87, SEQ ID NO:88, SEQ ID NO:89, SEQ ID NO:90, SEQ ID NO:91, SEQ ID NO:92, SEQ ID NO:93, SEQ ID NO:94, SEQ ID NO:95, SEQ ID NO:96, SEQ ID NO:97, SEQ ID NO:98, SEQ ID NO:99, SEQ ID NO:100, SEQ ID NO:101, SEQ ID NO:102, SEQ ID NO:103, SEQ ID NO:104, SEQ ID NO:105, SEQ ID NO:106, SEQ ID NO:107, SEQ ID NO:108, SEQ ID NO:l09, SEQ ID NO:110, SEQ ID NO:111, SEQ ID NO:112, SEQ ID NO:113, SEQ ID NO:114, SEQ ID NO:115, SEQ ID NO:116, SEQ ID NO:117, SEQ ID NO:118, SEQ ID NO:119, SEQ ID NO:120, and SEQ ID NO:121, or the corresponding full-length sequences, a functional derivative thereof, or a fragment thereof to which the nucleic acid probe will specifically hybridize. Specific hybridization indicates that in the presence of other nucleic acids the probe only hybridizes detectably with the kinase of the invention's target region. Putative target regions can be identified by methods well known in the art consisting of alignment and comparison of the most closely related sequences in the database.

[0096] In preferred embodiments the nucleic acid probe hybridizes to a kinase target region encoding at least 6, 12, 75, 90, 105, 120, 150, 200, 250, 300 or 350 contiguous amino acids of the sequence set forth in SEQ ID NO:122, SEQ ID NO:123, SEQ ID NO:124, SEQ ID NO:125, SEQ ID NO:126, SEQ ID NO:127, SEQ ID NO:128, SEQ ID NO:129, SEQ ID NO:130, SEQ ID NO:131, SEQ ID NO:132, SEQ ID NO:133, SEQ ID NO:134, SEQ ID NO:135, SEQ ID NO:136, SEQ ID NO:137, SEQ ID NO:138, SEQ ID NO:139, SEQ ID NO:140, SEQ ID NO:141, SEQ ID NO:142, SEQ ID NO:143, SEQ ID NO:144, SEQ ID NO:145, SEQ ID NO:146, SEQ ID NO:147, SEQ ID NO:148, SEQ ID NO:149, SEQ ID NO:150, SEQ ID NO:151, SEQ ID NO:152, SEQ ID NO:153, SEQ ID NO:154, SEQ ID NO:155, SEQ ID NO:156, SEQ ID NO:157, SEQ ID NO:158, SEQ ID NO:159, SEQ ID NO:160, SEQ ID NO:161, SEQ ID NO:162, SEQ ID NO:163, SEQ ID NO:164, SEQ ID NO:165. SEQ ID NO:166, SEQ ID NO:167, SEQ ID NO:168, SEQ ID NO:169, SEQ ID NO:170, SEQ ID NO:171, SEQ ID NO:172, SEQ ID NO:173, SEQ ID NO:174, SEQ ID NO:175, SEQ ID NO:176, SEQ ID NO:177, SEQ ID NO:178, SEQ ID NO:179, SEQ ID NO:180, SEQ ID NO:181, SEQ ID NO:182, SEQ ID NO:183, SEQ ID NO:184, SEQ ID NO:185, SEQ ID NO:186, SEQ ID NO:187, SEQ ID NO:188, SEQ ID NO:189, SEQ ID NO:190, SEQ ID NO:191, SEQ ID NO:199, SEQ ID NO:193, SEQ ID NO:194, SEQ ID NO:195, SEQ ID NO:196, SEQ ID NO:197, SEQ ID NO:198, SEQ ID NO:199, SEQ ID NO:200, SEQ ID NO:201, SEQ ID NO:202, SEQ ID NO:203, SEQ ID NO:204, SEQ ID NO:205, SEQ ID NO:206, SEQ ID NO:207, SEQ ID NO:208, SEQ ID NO:209, SEQ ID NO:210, SEQ ID NO:211, SEQ ID NO:212, SEQ ID NO:213, SEQ ID NO:214, SEQ ID NO:215, SEQ ID NO:216, SEQ ID NO:217, SEQ ID NO:218, SEQ ID NO:219, SEQ ID NO:220, SEQ ID NO:221, SEQ ID NO:222, SEQ ID NO:223, SEQ ID NO:224, SEQ ID NO:225, SEQ ID NO:226, SEQ ID NO:227, SEQ ID NO:228, SEQ ID NO:229, SEQ ID NO:230, SEQ ID NO:231, SEQ ID NO:232, SEQ ID NO:233, SEQ ID NO:234, SEQ ID NO:235, SEQ ID NO:236, SEQ ID NO:237, SEQ ID NO:238, SEQ ID NO:239, SEQ ID NO:240, SEQ ID NO:241, and SEQ ID NO:242, or the corresponding full-length amino acid sequence, or a functional derivative thereof. Hybridization conditions should be such that hybridization occurs only with the kinase genes in the presence of other nucleic acid molecules. Under stringent hybridization conditions only highly complementary nucleic acid sequences hybridize. Preferably, such conditions prevent hybridization of nucleic acids having more than 1 or 2 mismatches out of 20 contiguous nucleotides. Such conditions are defined supra.

[0097] Hybridization conditions should be such that hybridization occurs only with the genes in the presence of other nucleic acid molecules. Under stringent hybridization conditions only highly complementary nucleic acid sequences hybridize. Preferably, such conditions prevent hybridization of nucleic acids having 1 or 2 mismatches out of 20 contiguous nucleotides. Such conditions are defined supra.

[0098] The diseases for which detection of kinase genes in a sample could be diagnostic include diseases in which kinase nucleic acid (DNA and/or RNA) is amplified in comparison to normal cells. By “amplification” is meant increased numbers of kinase DNA or RNA in a cell compared with normal cells. In normal cells, kinases are typically found as single copy genes. In selected diseases, the chromosomal location of the kinase genes may be amplified, resulting in multiple copies of the gene, or amplification. Gene amplification can lead to amplification of kinase RNA, or kinase RNA can be amplified in the absence of kinase DNA amplification.

[0099] “Amplification” as it refers to RNA can be the detectable presence of kinase RNA in cells, since in some normal cells there is no basal expression of kinase RNA. In other normal cells, a basal level of expression of kinase exists, therefore in these cases amplification is the detection of at least 1-2-fold, and preferably more, kinase RNA, compared to the basal level.

[0100] The diseases that could be diagnosed by detection of kinase nucleic acid in a sample preferably include cancers. The test samples suitable for nucleic acid probing methods of the present invention include, for example, cells or nucleic acid extracts of cells, or biological fluids. The samples used in the above-described methods will vary based on the assay format, the detection method and the nature of the tissues, cells or extracts to be assayed. Methods for preparing nucleic acid extracts of cells are well known in the art and can be readily adapted in order to obtain a sample that is compatible with the method utilized.

[0101] Another aspect of the invention involves a method of agonizing (stimulating) or antagonizing a target of the invention and a natural binding partner associated activity in a mammal comprising administering to said mammal an agonist or antagonist to one of the above disclosed polypeptides in an amount sufficient to effect said agonism or antagonism. A method of treating diseases in a mammal with an agonist or antagonist of the protein of the present invention activity comprising administering the agonist or antagonist to a mammal in an amount sufficient to agonize or antagonize associated functions is also encompassed in the present application.

[0102] In an effort to discover novel treatments for diseases, biomedical researchers and chemists have designed, synthesized, and tested molecules that inhibit the function of protein polypeptides. Some small organic molecules form a class of compounds that modulate the function of protein polypeptides. Examples of molecules that have been reported to inhibit the function of protein kinases include, but are not limited to, bis monocyclic, bicyclic or heterocyclic aryl compounds (PCT WO 92/20642, published Nov. 26, 1992 by Maguire et al.), vinylene-azaindole derivatives (PCT WO 94/14808, published Jul. 7, 1994 by Ballinari et al.), 1-cyclopropyl-4-pyridyl-quinolones (U.S. Pat. No. 5,330,992), styryl compounds (U.S. Pat. No. 5,217,999), styryl-substituted pyridyl compounds (U.S. Pat. No. 5,302,606), certain quinazoline derivatives (EP application No. 0,566,266 A1), seleoindoles and selenides (PCT WO 94/03427, published Feb. 17, 1994 by Denny et al.), tricyclic polyhydroxylic compounds (PCT WO 92/21660, published Dec. 10, 1992 by Dow), and benzylphosphonic acid compounds (PCT WO 91/15495, published Oct. 17, 1991 by Dow et al, all of which are incorporated by reference herein, including any drawings.

[0103] Compounds that can traverse cell membranes and are resistant to acid hydrolysis are potentially advantageous as therapeutics as they can become highly bioavailable after being administered orally to patients. However, many of these protein inhibitors only weakly inhibit function. In addition, many inhibit a variety of protein kinases and will therefore cause multiple side-effects as therapeutics for diseases.

[0104] Some indolinone compounds, however, form classes of acid resistant and membrane permeable organic molecules. WO 96/22976 (published Aug. 1, 1996 by Ballinari et al.) describes hydrosoluble indolinone compounds that harbor tetralin, naphthalene, quinoline, and indole substituents fused to the oxindole ring. These bicyclic substituents are in turn substituted with polar groups including hydroxylated alkyl, phosphate, and ether substituents. U.S. patent application Ser. No. 08/702,232, filed Aug. 23, 1996, entitled “Indolinone Combinatorial Libraries and Related Products and Methods for the Treatment of Disease” by Tang et al. (Lyon & Lyon Docket No. 221/187) and Ser. No. 08/485,323, filed Jun. 7,1995, entitled “Benzylidene-Z-Indoline Compounds for the Treatment of Disease” by Tang et al. (Lyon & Lyon Docket No. 223/298) and International Patent Publication WO 96/22976, published Aug. 1, 1996 by Ballinari et al., all of which are incorporated herein by reference in their entirety, including any drawings, describe indolinone chemical libraries of indolinone compounds harboring other bicyclic moieties as well as monocyclic moieties fused to the oxindole ring. Applications Ser. No. 08/702,232, filed Aug. 23, 1996, entitled “Indolinone Combinatorial Libraries and Related Products and Methods for the Treatment of Disease” by Tang et al. (Lyon & Lyon Docket No. 221/187), Ser. No. 08/485,323, filed Jun. 7, 1995, entitled “Benzylidene-Z-Indoline Compounds for the Treatment of Disease” by Tang et al. (Lyon & Lyon Docket No. 223/298), and WO 96/22976, published Aug. 1, 1996 by Ballinari et al. teach methods of indolinone synthesis, methods of testing the biological activity of indolinone compounds in cells, and inhibition patterns of indolinone derivatives, both of which are incorporated by reference herein, including any drawings.

[0105] Other examples of substances capable of modulating kinase activity include, but are not limited to, tyrphostins, quinazolines, quinoxolines, and quinolines. The quinazolines, tyrphostins, quinolines, and quinoxolines referred to above include well known compounds such as those described in the literature. For example, representative publications describing quinazolines include Barker et al., EPO Publication No. 0 520 722 Al; Jones et al., U.S. Pat. No. 4,447,608; Kabbe et al., U.S. Pat. No. 4,757,072; Kaul and Vougioukas, U.S. Pat. No. 5,316,553; Kreighbaum and Comer, U.S. Pat. No. 4,343,940; Pegg and Wardleworth, EPO Publication No. 0 562 734 Al; Barker et al., Proc. of Am. Assoc. for Cancer Research 32:327 (1991); Bertino, J. R., Cancer Research 3:293-304 (1979); Bertino, J. R, Cancer Research 9(2 part 1):293-304 (1979); Curtin et al., Br. J. Cancer 53:361-368 (1986); Fernandes et al., Cancer Research 43:1117-1123 (1983); Ferris et al. J. Org. Chem. 44(2):173-178; Fry et al., Science 265:1093-1095 (1994); Jackman et al., Cancer Research 51:5579-5586 (1981); Jones et al. J. Med. Chem. 29(6):1114-1118; Lee and Skibo, Biochemistry 26(23):7355-7362 (1987); Lemus et al., J. Org. Chem. 54:3511-3518 (1989); Ley and Seng, Synthesis 1975:415-522 (1975); Maxwell et al., Magnetic Resonance in Medicine 17:189-196 (1991); Mini et al., Cancer Research 45:325-330 (1985); Phillips and Castle, J. Heterocyclic Chem. 17(19):1489-1596 (1980); Reece et al., Cancer Research 47(11):2996-2999 (1977); Sculier et al., Cancer Immunol. and Immunother. 23:A65 (1986); Sikora et al., Cancer Letters 23:289-295 (1984); and Sikora et al., Analytical Biochem. 172:344-355 (1988), all of which are incorporated herein by reference in their entirety, including any drawings.

[0106] Quinoxaline is described in Kaul and Vougioukas, U.S. Pat. No. 5,316,553, incorporated herein by reference in its entirety, including any drawings.

[0107] Quinolines are described in Dolle et al., J. Med. Chem. 37:2627-2629 (1994); MaGuire, J. Med. Chem. 37:2129-2131 (1994); Burke et al., J. Med. Chem. 36:425-432 (1993); and Burke et al. BioOrganic Med. Chem. Letters 2:1771-1774 (1992), all of which are incorporated by reference in their entirety, including any drawings.

[0108] Tyrphostins are described in Allen et al., Clin. Exp. Immunol. 91:141-156 (1993); Anafi et al., Blood 82:12:3524-3529 (1993); Baker et al., J. Cell Sci. 102:543-555 (1992); Bilderet al., Amer. Physiol. Soc. pp. 6363-6143:C721-C730 (1991); Brunton et al., Proceedings of Amer. Assoc. Cancer Rsch. 33:558 (1992); Bryckaert et al., Experimental Cell Research 199:255-261 (1992); Dong et al., J. Leukocyte Biology 53:53-60 (1993); Dong et al., J. Immunol. 151(5):2717-2724 (1993); Gazit et al., J. Med. Chem. 32:2344-2352 (1989); Gazit et al., “J. Med. Chem. 36:3556-3564 (1993); Kaur et al., Anti-Cancer Drugs 5:213-222 (1994); Kaur et al., King et al., Biochem. J. 275:413418 (1991); Kuo et al., Cancer Letters 74:197-202 (1993); Levitzki, A., The FASEB J. 6:3275-3282 (1992); Lyall et al., J. Biol. Chem. 264:14503-14509 (1989); Peterson et al., The Prostate 22:335-345 (1993); Pillemer et al., Int. J. Cancer 50:80-85 (1992); Posner et al., Molecular Pharmacology 45:673-683 (1993); Rendu et al., Biol. Pharmacology 44(5):881-888 (1992); Sauro and Thomas, Life Sciences 53:371-376 (1993); Sauro and Thomas, J. Pharm. and Experimental Therapeutics 267(3):119-1125 (1993); Wolbring et al., J. Biol. Chem. 269(36):22470-22472 (1994); and Yoneda et al., Cancer Research 51:4430-4435 (1991); all of which are incorporated herein by reference in their entirety, including any drawings.

[0109] Other compounds that could be used as modulators include oxindolinones such as those described in U.S. patent application Ser. No. 08/702,232 filed Aug. 23, 1996, incorporated herein by reference in its entirety, including any drawings.

Methods of Treating a Disease (Enablement—i.e., Dosing)

[0110] Methods of determining the dosages of compounds to be administered to a patient and modes of administering compounds to an organism are disclosed in U.S. application Ser. No. 08/702,282, filed Aug. 23, 1996 and International patent publication number WO 96/22976, published Aug. 1, 1996, both of which are incorporated herein by reference in their entirety, including any drawings, figures or tables. Those skilled in the art will appreciate that such descriptions are applicable to the present invention and can be easily adapted to it.

[0111] The proper dosage depends on various factors such as the type of disease being treated, the particular composition being used and the size and physiological condition of the patient. Therapeutically effective doses for the compounds described herein can be estimated initially from cell culture and animal models. For example, a dose can be formulated in animal models to achieve a circulating concentration range that initially takes into account the IC₅₀ as determined in cell culture assays. The animal model data can be used to more accurately determine useful doses in humans.

[0112] Plasma half-life and biodistribution of the drug and metabolites in the plasma, tumors and major organs can also be determined to facilitate the selection of drugs most appropriate to inhibit a disorder. Such measurements can be carried out. For example, HPLC analysis can be performed on the plasma of animals treated with the drug and the location of radiolabeled compounds can be deter-mined using detection methods such as X-ray, CAT scan and MRI. Compounds that show potent inhibitory activity in the screening assays, but have poor pharmacokinetic characteristics, can be optimized by altering the chemical structure and retesting. In this regard, compounds displaying good pharmacokinetic characteristics can be used as a model.

[0113] Toxicity studies can also be carried out by measuring the blood cell composition. For example, toxicity studies can be carried out in a suitable animal model as follows: 1) the compound is administered to mice (an untreated control mouse should also be used); 2) blood samples are periodically obtained via the tail vein from one mouse in each treatment group; and 3) the samples are analyzed for red and white blood cell counts, blood cell composition and the percent of lymphocytes versus polymorphonuclear cells. A comparison of results for each dosing regime with the controls indicates if toxicity is present.

[0114] At the termination of each toxicity study, further studies can be carried out by sacrificing the animals (preferably, in accordance with the American Veterinary Medical Association guidelines Report of the American Veterinary Medical Assoc. Panel on Euthanasia, Journal of American Veterinary Medical Assoc., 202:229-249, 1993). Representative animals from each treatment group can then be examined by gross necropsy for immediate evidence of metastasis, unusual illness or toxicity. Gross abnormalities in tissue are noted and tissues are examined histologically. Compounds causing a reduction in body weight or blood components are less preferred, as are compounds having an adverse effect on major organs. In general, the greater the adverse effect the less preferred the compound.

[0115] For the treatment of cancers the expected daily dose of a hydrophobic pharmaceutical agent is between 1 to 500 mg/day, preferably 1 to 250 mg/day, and most preferably 1 to 50 mg/day. Drugs can be delivered less frequently provided plasma levels of the active moiety are sufficient to maintain therapeutic effectiveness.

[0116] Plasma levels should reflect the potency of the drug. Generally, the more potent the compound the lower the plasma levels necessary to achieve efficacy.

[0117] In a final aspect, the invention features a method for detection of a kinase polypeptide in a sample as a diagnostic tool for a disease or disorder, wherein the method comprises: (a) comparing a nucleic acid target region encoding the kinase polypeptide in a sample, where the kinase polypeptide is selected from the group consisting of SEQ ID NO:122, SEQ ID NO:123, SEQ ID NO:124, SEQ ID NO:125, SEQ ID NO:126, SEQ ID NO:127, SEQ ID NO:128, SEQ ID NO:129, SEQ ID NO:130, SEQ ID NO:131, SEQ ID NO:132, SEQ ID NO:133, SEQ ID NO:134, SEQ ID NO:135, SEQ ID NO:136, SEQ ID NO:137, SEQ ID NO:138, SEQ ID NO:139, SEQ ID NO:140, SEQ ID NO:141, SEQ ID NO:142, SEQ ID NO:143, SEQ ID NO:144, SEQ ID NO:145, SEQ ID NO:146, SEQ ID NO:147, SEQ ID NO:148, SEQ ID NO:149, SEQ ID NO:150, SEQ ID NO:151, SEQ ID NO:152, SEQ ID NO:153, SEQ ID NO:154, SEQ ID NO:155, SEQ ID NO:156, SEQ ID NO:157, SEQ ID NO:158, SEQ ID NO:159, SEQ ID NO:160, SEQ ID NO:161, SEQ ID NO:162, SEQ ID NO:163, SEQ ID NO:164, SEQ ID NO:165. SEQ ID NO:166, SEQ ID NO:167, SEQ ID NO:168, SEQ ID NO:169, SEQ ID NO:170, SEQ ID NO:171, SEQ ID NO:172, SEQ ID NO:173, SEQ ID NO:174, SEQ ID NO:175, SEQ ID NO:176, SEQ ID NO:177, SEQ ID NO:178, SEQ ID NO:179, SEQ ID NO:180, SEQ ID NO:181, SEQ ID NO:182, SEQ ID NO:183, SEQ ID NO:184, SEQ ID NO:185, SEQ ID NO:186, SEQ ID NO:187, SEQ ID NO:188, SEQ ID NO:189, SEQ ID NO:190, SEQ ID NO:191, SEQ ID NO:199, SEQ ID NO:193, SEQ ID NO:194, SEQ ID NO:195, SEQ ID NO:196, SEQ ID NO:197, SEQ ID NO:198, SEQ ID NO:199, SEQ ID NO:200, SEQ ID NO:201, SEQ ID NO:202, SEQ ID NO:203, SEQ ID NO:204, SEQ ID NO:205, SEQ ID NO:206, SEQ ID NO:207, SEQ ID NO:208, SEQ ID NO:209, SEQ ID NO:210, SEQ ID NO:211, SEQ ID NO:212, SEQ ID NO:213, SEQ ID NO:214, SEQ ID NO:215, SEQ ID NO:216, SEQ ID NO:217, SEQ ID NO:218, SEQ ID NO:219, SEQ ID NO:220, SEQ ID NO:221, SEQ ID NO:222, SEQ ID NO:223, SEQ ID NO:224, SEQ ID NO:225, SEQ ID NO:226, SEQ ID NO:227, SEQ ID NO:228, SEQ ID NO:229, SEQ ID NO:230, SEQ ID NO:231, SEQ ID NO:232, SEQ ID NO:233, SEQ ID NO:234, SEQ ID NO:235, SEQ ID NO:236, SEQ ID NO:237, SEQ ID NO:238, SEQ ID NO:239, SEQ ID NO:240, SEQ ID NO:241, and SEQ ID NO:242, or one or more fragments thereof, with a control nucleic acid target region encoding the kinase polypeptide, or one or more fragments thereof; and (b) detecting differences in sequence or amount between the target region and the control target region, as an indication of the disease or disorder. Preferably, the disease or disorder is selected from the group consisting of immune-related diseases and disorders, organ transplantation, myocardial infarction, cardiovascular disease, stroke, renal failure, oxidative stress-related neurodegenerative disorders, and cancer. Immune-related diseases and disorders include, but are not limited to, those discussed previously.

[0118] The term “comparing” as used herein refers to identifying discrepancies between the nucleic acid target region isolated from a sample, and the control nucleic acid target region. The discrepancies can be in the nucleotide sequences, e.g. insertions, deletions, or point mutations, or in the amount of a given nucleotide sequence. Methods to determine these discrepancies in sequences are well-known to one of ordinary skill in the art. The “control” nucleic acid target region refers to the sequence or amount of the sequence found in normal cells, e.g. cells that are not diseased as discussed previously.

[0119] The term also includes anti-sense molecules drawn thereto.

[0120] The invention has been described broadly and generically herein. Each of the narrower species and subgeneric groupings falling within the generic disclosure also form part of the invention. This includes the generic description of the invention with a proviso or negative limitation removing any subject matter from the genus, regardless of whether or not the excised material is specifically recited herein. For example, in some instances the nucleotide sequence of particular kinase polypeptides may not be part of a preferred embodiment.

[0121] The summary of the invention described above is not limiting and other features and advantages of the invention will be apparent from the following detailed description of the invention, and from the claims.

### BRIEF DESCRIPTION OF THE FIGURES

[0122] FIGS. 1A to 1BB shows the amino acid sequences of SEQ ID NO:122, SEQ ID NO:123, SEQ ID NO:124, SEQ ID NO:125, SEQ ID NO:126, SEQ ID NO:127, SEQ ID NO:128, SEQ ID NO:129, SEQ ID NO:130, SEQ ID NO:131, SEQ ID NO:132, SEQ ID NO:133, SEQ ID NO:134, SEQ ID NO:135, SEQ ID NO:136, SEQ ID NO:137, SEQ ID NO:138, SEQ ID NO:139, SEQ ID NO:140, SEQ ID NO:141, SEQ ID NO:142, SEQ ID NO:143, SEQ ID NO:144, SEQ ID NO:145, SEQ ID NO:146, SEQ ID NO:147, SEQ ID NO:148, SEQ ID NO:149, SEQ ID NO:150, SEQ ID NO:151, SEQ ID NO:152, SEQ ID NO:153, SEQ ID NO:154, SEQ ID NO:155, SEQ ID NO:156, SEQ ID NO:157, SEQ ID NO:158, SEQ ID NO:159, SEQ ID NO:160, SEQ ID NO:161, SEQ ID NO:162, SEQ ID NO:163, SEQ ID NO:164, SEQ ID NO:165. SEQ ID NO:166, SEQ ID NO:167, SEQ ID NO:168, SEQ ID NO:169, SEQ ID NO:170, SEQ ID NO:171, SEQ ID NO:172, SEQ ID NO:173, SEQ ID NO:174, SEQ ID NO:175, SEQ ID NO:176, SEQ ID NO:177, SEQ ID NO:178, SEQ ID NO:179, SEQ ID NO:180, SEQ ID NO:181, SEQ ID NO:182, SEQ ID NO:183, SEQ ID NO:184, SEQ ID NO:185, SEQ ID NO:186, SEQ ID NO:187, SEQ ID NO:188, SEQ ID NO:189, SEQ ID NO:190, SEQ ID NO:191, SEQ ID NO:199, SEQ ID NO:193, SEQ ID NO:194, SEQ ID NO:195, SEQ ID NO:196, SEQ ID NO:197, SEQ ID NO:198, SEQ ID NO:199, SEQ ID NO:200, SEQ ID NO:201, SEQ ID NO:202, SEQ ID NO:203, SEQ ID NO:204, SEQ ID NO:205, SEQ ID NO:206, SEQ ID NO:207, SEQ ID NO:208, SEQ ID NO:209, SEQ ID NO:210, SEQ ID NO:211, SEQ ID NO:212, SEQ ID NO:213, SEQ ID NO:214, SEQ ID NO:215, SEQ ID NO:216, SEQ ID NO:217, SEQ ID NO:218, SEQ ID NO:219, SEQ ID NO:220, SEQ ID NO:221, SEQ ID NO:222, SEQ ID NO:223, SEQ ID NO:224, SEQ ID NO:225, SEQ ID NO:226, SEQ ID NO:227, SEQ ID NO:228, SEQ ID NO:229, SEQ ID NO:230, SEQ ID NO:231, SEQ ID NO:232, SEQ ID NO:233, SEQ ID NO:234, SEQ ID NO:235, SEQ ID NO:236, SEQ ID NO:237, SEQ ID NO:238, SEQ ID NO:239, SEQ ID NO:240, SEQ ID NO:241, and SEQ ID NO:242.

[0123] FIGS. 2A to 2MMMM shows the nucleic acid sequences of SEQ ID NO:1, SEQ ID NO:2, SEQ ID NO:3, SEQ ID NO:4, SEQ ID NO:5, SEQ ID NO:6, SEQ ID NO:7, SEQ ID NO:8, SEQ ID NO:9, SEQ ID NO:10, SEQ ID NO:11, SEQ ID NO:12, SEQ ID NO:13, SEQ ID NO:14, SEQ ID NO:15, SEQ ID NO:16, SEQ ID NO:17, SEQ ID NO:18, SEQ ID NO:19, SEQ ID NO:20, SEQ ID NO:21, SEQ ID NO:22, SEQ ID NO:23, SEQ ID NO:24, SEQ ID NO:25, SEQ ID NO:26, SEQ ID NO:27, SEQ ID NO:28, SEQ ID NO:29, SEQ ID NO:30, SEQ ID NO:31, SEQ ID NO:32, SEQ ID NO:33, SEQ ID NO:34, SEQ ID NO:35, SEQ ID NO:36, SEQ ID NO:37, SEQ ID NO:38, SEQ ID NO:39, SEQ ID NO:40, SEQ ID NO:41, SEQ ID NO:42, SEQ ID NO:43, SEQ ID NO:44, SEQ ID NO:45, SEQ ID NO:46, SEQ ID NO:47, SEQ ID NO:48, SEQ ID NO:49, SEQ ID NO:50, SEQ ID NO:51, SEQ ID NO:52, SEQ ID NO:53, SEQ ID NO:54, SEQ ID NO:55, SEQ ID NO:56, SEQ ID NO:57, SEQ ID NO:58, SEQ ID NO:59, SEQ ID NO:60, SEQ ID NO:61, SEQ ID NO:62, SEQ ID NO:63, SEQ ID NO:64, SEQ ID NO:65, SEQ ID NO:66, SEQ ID NO:67, SEQ ID NO:68, SEQ ID NO:69, SEQ ID NO:70, SEQ ID NO:71, SEQ ID NO:72, SEQ ID NO:73, SEQ ID NO:74, SEQ ID NO:75, SEQ ID NO:76, SEQ ID NO:77, SEQ ID NO:78, SEQ ID NO:79, SEQ ID NO:80, SEQ ID NO:81, SEQ ID NO:82, SEQ ID NO:83, SEQ ID NO:84, SEQ ID NO:85, SEQ ID NO:86, SEQ ID NO:87, SEQ ID NO:88, SEQ ID NO:89, SEQ ID NO:90, SEQ ID NO:91, SEQ ID NO:92, SEQ ID NO:93, SEQ ID NO:94, SEQ ID NO:95, SEQ ID NO:96, SEQ ID NO:97, SEQ ID NO:98, SEQ ID NO:99, SEQ ID NO:100, SEQ ID NO:101, SEQ ID NO:102, SEQ ID NO:103, SEQ ID NO:104, SEQ ID NO:105, SEQ ID NO:106, SEQ ID NO:107, SEQ ID NO:108, SEQ ID NO:109, SEQ ID NO:110, SEQ ID NO:111, SEQ ID NO:112, SEQ ID NO:113, SEQ ID NO:114, SEQ ID NO:115, SEQ ID NO:116, SEQ ID NO:117, SEQ ID NO:118, SEQ ID NO:119, SEQ ID NO:120, and SEQ ID NO:121.

### DETAILED DESCRIPTION OF THE INVENTION

[0124] The present invention relates in part to kinase polypeptides, nucleic acids encoding such polypeptides, cells containing such nucleic acids, antibodies to such polypeptides, assays utilizing such polypeptides, and methods relating to all of the foregoing. The present invention is based upon the isolation and characterization of new kinase polypeptides. The polypeptides and nucleic acids may be produced using well-known and standard synthesis techniques when given the sequences presented herein.

I. The Nucleic Acids of the Invention

[0125] Included within the scope of this invention are the functional equivalents of the herein-described isolated nucleic acid molecules. The degeneracy of the genetic code permits substitution of certain codons by other codons that specify the same amino acid and hence would give rise to the same protein. The nucleic acid sequence can vary substantially since, with the exception of methionine and tryptophan, the known amino acids can be coded for by more than one codon. Thus, portions or all of the kinase genes of the invention could be synthesized to give a nucleic acid sequence significantly different from one selected from the group consisting of those set forth in SEQ ID NO:1, SEQ ID NO:2, SEQ ID NO:3, SEQ ID NO:4, SEQ ID NO:5, SEQ ID NO:6, SEQ ID NO:7, SEQ ID NO:8, SEQ ID NO:9, SEQ ID NO:10, SEQ ID NO:11, SEQ ID NO:12, SEQ ID NO:13, SEQ ID NO:14, SEQ ID NO:15, SEQ ID NO:16, SEQ ID NO:17, SEQ ID NO:18, SEQ ID NO:19, SEQ ID NO:20, SEQ ID NO:21, SEQ ID NO:22, SEQ ID NO:23, SEQ ID NO:24, SEQ ID NO:25, SEQ ID NO:26, SEQ ID NO:27, SEQ ID NO:28, SEQ ID NO:29, SEQ ID NO:30, SEQ ID NO:31, SEQ ID NO:32, SEQ ID NO:33, SEQ ID NO:34, SEQ ID NO:35, SEQ ID NO:36, SEQ ID NO:37, SEQ ID NO:38, SEQ ID NO:39, SEQ ID NO:40, SEQ ID NO:41, SEQ ID NO:42, SEQ ID NO:43, SEQ ID NO:44, SEQ ID NO:45, SEQ ID NO:46, SEQ ID NO:47, SEQ ID NO:48, SEQ ID NO:49, SEQ ID NO:50, SEQ ID NO:51, SEQ ID NO:52, SEQ ID NO:53, SEQ ID NO:54, SEQ ID NO:55, SEQ ID NO:56, SEQ ID NO:57, SEQ ID NO:58, SEQ ID NO:59, SEQ ID NO:60, SEQ ID NO:61, SEQ ID NO:62, SEQ ID NO:63, SEQ ID NO:64, SEQ ID NO:65, SEQ ID NO:66, SEQ ID NO:67, SEQ ID NO:68, SEQ ID NO:69, SEQ ID NO:70, SEQ ID NO:71, SEQ ID NO:72, SEQ ID NO:73, SEQ ID NO:74, SEQ ID NO:75, SEQ ID NO:76, SEQ ID NO:77, SEQ ID NO:78, SEQ ID NO:79, SEQ ID NO:80, SEQ ID NO:81, SEQ ID NO:82, SEQ ID NO:83, SEQ ID NO:84, SEQ ID NO:85, SEQ ID NO:86, SEQ ID NO:87, SEQ ID NO:88, SEQ ID NO:89, SEQ ID NO:90, SEQ ID NO:91, SEQ ID NO:92, SEQ ID NO:93, SEQ ID NO:94, SEQ ID NO:95, SEQ ID NO:96, SEQ ID NO:97, SEQ ID NO:98, SEQ ID NO:99, SEQ ID NO:100, SEQ ID NO:101, SEQ ID NO:102, SEQ ID NO:103, SEQ ID NO:104, SEQ ID NO:105, SEQ ID NO:106, SEQ ID NO:107, SEQ ID NO:108, SEQ ID NO:109, SEQ ID NO:110, SEQ ID NO:111, SEQ ID NO:112, SEQ ID NO:113, SEQ ID NO:114, SEQ ID NO:115, SEQ ID NO:116, SEQ ID NO:117, SEQ ID NO:118, SEQ ID NO:119, SEQ ID NO:120, and SEQ ID NO:121. The encoded amino acid sequence thereof would, however, be preserved.

[0126] In addition, the nucleic acid sequence may comprise a nucleotide sequence which results from the addition, deletion or substitution of at least one nucleotide to the 5′-end and/or the 3′-end of the nucleic acid sequence shown in SEQ ID NO:1, SEQ ID NO:2, SEQ ID NO:3, SEQ ID NO:4, SEQ ID NO:5, SEQ ID NO:6, SEQ ID NO:7, SEQ ID NO:8, SEQ ID NO:9, SEQ ID NO:10, SEQ ID NO:11, SEQ ID NO:12, SEQ ID NO:13, SEQ ID NO:14, SEQ ID NO:15, SEQ ID NO:16, SEQ ID NO:17, SEQ ID NO:18, SEQ ID NO:19, SEQ ID NO:20, SEQ ID NO:21, SEQ ID NO:22, SEQ ID NO:23, SEQ D NO:24, SEQ ID NO:25, SEQ ID NO:26, SEQ ID NO:27, SEQ ID NO:28, SEQ ID NO:29, SEQ ID NO:30, SEQ ID NO:31, SEQ ID NO:32, SEQ ID NO:33, SEQ ID NO:34, SEQ ID NO:35, SEQ ID NO:36, SEQ ID NO:37, SEQ ID NO:38, SEQ ID NO:39, SEQ ID NO:40, SEQ ID NO:41, SEQ ID NO:42, SEQ ID NO:43, SEQ ID NO:44, SEQ ID NO:45, SEQ ID NO:46, SEQ ID NO:47, SEQ ID NO:48, SEQ ID NO:49, SEQ ID NO:50, SEQ ID NO:51, SEQ ID NO:52, SEQ ID NO:53, SEQ ID NO:54, SEQ ID NO:55, SEQ ID NO:56, SEQ ID NO:57, SEQ ID NO:58, SEQ ID NO:59, SEQ ID NO:60, SEQ ID NO:61, SEQ ID NO:62, SEQ ID NO:63, SEQ ID NO:64, SEQ ID NO:65, SEQ ID NO:66, SEQ ID NO:67, SEQ ID NO:68, SEQ ID NO:69, SEQ ID NO:70, SEQ ID NO:71, SEQ ID NO:72, SEQ ID NO:73, SEQ ID NO:74, SEQ ID NO:75, SEQ ID NO:76, SEQ ID NO:77, SEQ ID NO:78, SEQ ID NO:79, SEQ ID NO:80, SEQ ID NO:81, SEQ ID NO:82, SEQ ID NO:83, SEQ ID NO:84, SEQ ID NO:85, SEQ ID NO:86, SEQ ID NO:87, SEQ ID NO:88, SEQ ID NO:89, SEQ ID NO:90, SEQ ID NO:91, SEQ ID NO:92, SEQ ID NO:93, SEQ ID NO:94, SEQ ID NO:95, SEQ ID NO:96, SEQ ID NO:97, SEQ ID NO:98, SEQ ID NO:99, SEQ ID NO:100, SEQ ID NO:101, SEQ ID NO:102, SEQ ID NO:103, SEQ ID NO:104, SEQ ID NO:105, SEQ ID NO:106, SEQ ID NO:107, SEQ ID NO:108, SEQ ID NO:109, SEQ ID NO:110, SEQ ID NO:111, SEQ ID NO:112, SEQ ID NO:113, SEQ ID NO:114, SEQ ID NO:115, SEQ ID NO:116, SEQ ID NO:117, SEQ ID NO:118, SEQ ID NO:1 19, SEQ ID NO:120, and SEQ ID NO:121, or a derivative thereof. Any nucleotide or polynucleotide may be used in this regard, provided that its addition, deletion or substitution does not alter the amino acid sequence of SEQ ID NO:122, SEQ ID NO:123, SEQ ID NO:124, SEQ ID NO:125, SEQ ID NO:126, SEQ ID NO:127, SEQ ID NO:128, SEQ ID NO:129, SEQ ID NO:130, SEQ ID NO:131, SEQ ID NO:132, SEQ ID NO:133, SEQ ID NO:134, SEQ ID NO:135, SEQ ID NO:136, SEQ ID NO:137, SEQ ID NO:138, SEQ ID NO:139, SEQ ID NO:140, SEQ ID NO:141, SEQ ID NO:142, SEQ ID NO:143, SEQ ID NO:144, SEQ ID NO:145, SEQ ID NO:146, SEQ ID NO:147, SEQ ID NO:148, SEQ ID NO:149, SEQ ID NO:150, SEQ ID NO:151, SEQ ID NO:152, SEQ ID NO:153, SEQ ID NO:154, SEQ ID NO:155, SEQ ID NO:156, SEQ ID NO:157, SEQ ID NO:158, SEQ ID NO:159, SEQ ID NO:160, SEQ ID NO:161, SEQ ID NO:162, SEQ ID NO:163, SEQ ID NO:164, SEQ ID NO:165. SEQ ID NO:166, SEQ ID NO:167, SEQ ID NO:168, SEQ ID NO:169, SEQ ID NO:170, SEQ ID NO:171, SEQ ID NO:172, SEQ ID NO:173, SEQ ID NO:174, SEQ ID NO:175, SEQ ID NO:176, SEQ ID NO:177, SEQ ID NO:178, SEQ ID NO:179, SEQ ID NO:180, SEQ ID NO:181, SEQ ID NO:182, SEQ ID NO:183, SEQ ID NO:184, SEQ ID NO:185, SEQ ID NO:186, SEQ ID NO:187, SEQ ID NO:188, SEQ ID NO:189, SEQ ID NO:190, SEQ ID NO:191, SEQ ID NO:199, SEQ ID NO:193, SEQ ID NO:194, SEQ ID NO:195, SEQ ID NO:196, SEQ ID NO:197, SEQ ID NO:198, SEQ ID NO:199, SEQ ID NO:200, SEQ ID NO:201, SEQ ID NO:202, SEQ ID NO:203, SEQ ID NO:204, SEQ ID NO:205, SEQ ID NO:206, SEQ ID NO:207, SEQ ID NO:208, SEQ ID NO:209, SEQ ID NO:210, SEQ ID NO:211, SEQ ID NO:212, SEQ ID NO:213, SEQ ID NO:214, SEQ ID NO:215, SEQ ID NO:216, SEQ ID NO:217, SEQ ID NO:218, SEQ ID NO:219, SEQ ID NO:220, SEQ ID NO:221, SEQ ID NO:222, SEQ ID NO:223, SEQ ID NO:224, SEQ ID NO:225, SEQ ID NO:226, SEQ ID NO:227, SEQ ID NO:228, SEQ ID NO:229, SEQ ID NO:230, SEQ ID NO:231, SEQ ID NO:232, SEQ ID NO:233, SEQ ID NO:234, SEQ ID NO:235, SEQ ID NO:236, SEQ ID NO:237, SEQ ID NO:238, SEQ ID NO:239, SEQ ID NO:240, SEQ ID NO:241, and SEQ ID NO:242, that is encoded by the nucleotide sequence. For example, the present invention is intended to include any nucleic acid sequence resulting from the addition of ATG as an initiation codon at the 5′-end of the inventive nucleic acid sequence or its derivative, or from the addition of TTA, TAG or TGA as a termination codon at the 3′-end of the inventive nucleotide sequence or its derivative. Moreover, the nucleic acid molecule of the present invention may, as necessary, have restriction endonuclease recognition sites added to its 5′-end and/or 3′-end.

[0127] Such functional alterations of a given nucleic acid sequence afford an opportunity to promote secretion and/or processing of heterologous proteins encoded by foreign nucleic acid sequences fused thereto, for example. All variations of the nucleotide sequence of the kinase genes of the invention and fragments thereof permitted by the genetic code are, therefore, included in this invention.

[0128] Further, it is possible to delete codons or to substitute one or more codons with codons other than degenerate codons to produce a structurally modified polypeptide, but one which has substantially the same utility or activity as the polypeptide produced by the unmodified nucleic acid molecule. As recognized in the art, the two polypeptides are functionally equivalent, as are the two nucleic acid molecules that give rise to their production, even though the differences between the nucleic acid molecules are not related to the degeneracy of the genetic code. This is discussed further in the “Functional Derivatives” section, herein.

[0129] Finally, many of the nucleic acid molecules of the invention are provided as a partial sequence only (FIG. 2A through 2QQ). However, it is standard for one of ordinary skill in the art to obtain a full-length sequence when provided with a partial sequence. Similarly, when provided with a partial or full-length sequence it is standard for one of ordinary skill in the art to obtain nucleic acid sequence coding for homologous proteins. Therefore, these nucleic acid molecules are also part of the invention.

[0130] The characteristics of the protein kinase nucleic acid sequences of the invention are provided in Table 1. The protein kinases fall into 10 known groups: AGC, CAMK, CKI, CMGC, dsPK, EIFK, LIMK, MLK, STE and TK. In addition, there are a significant number of protein kinases that do not belong to any of the known groups, and therefore presumably define new protein kinase groups.

[0131] Additional characteristics may be found, inter alia, in the tables, namely Table 1, Table 2, Table 3 and Table 4, shown below.

II. Nucleic Acid Probes. Methods. and Kits for Detection of Protein Kinases

[0132] A nucleic acid probe of the present invention may be used to probe an appropriate chromosomal or cDNA library by usual hybridization methods to obtain other nucleic acid molecules of the present invention. A chromosomal DNA or cDNA library may be prepared from appropriate cells according to recognized methods in the art (cf. “Molecular Cloning: A Laboratory Manual”, second edition, Cold Spring Harbor Laboratory, Sambrook, Fritsch, & Maniatis, eds., 1989).

[0133] In the alternative, chemical synthesis can be carried out in order to obtain nucleic acid probes having nucleotide sequences that correspond to N-terminal, kinase or C-terminal portions, for example, of the amino acid sequence of the polypeptide of interest. The synthesized nucleic acid probes may be used as primers in a polymerase chain reaction (PCR) carried out in accordance with recognized PCR techniques, essentially according to PCR Protocols, “A Guide to Methods and Applications”, Academic Press, Michael, et al., eds., 1990, utilizing the appropriate chromosomal or cDNA library to obtain the fragment of the present invention.

[0134] One skilled in the art can readily design such probes based on the sequence disclosed herein using methods of computer alignment and sequence analysis known in the art (“Molecular Cloning: A Laboratory Manual”, 1989, supra). The hybridization probes of the present invention can be labeled by standard labeling techniques such as with a radiolabel, enzyme label, fluorescent label, biotin-avidin label, chemiluminescence, and the like. After hybridization, the probes may be visualized using known methods.

[0135] The nucleic acid probes of the present invention include RNA, as well as DNA probes, such probes being generated using techniques known in the art. The nucleic acid probe may be immobilized on a solid support. Examples of such solid supports include, but are not limited to, plastics such as polycarbonate, complex carbohydrates such as agarose and sepharose, and acrylic resins, such as polyacrylamide and latex beads. Techniques for coupling nucleic acid probes to such solid supports are well known in the art.

[0136] The test samples suitable for nucleic acid probing methods of the present invention include, for example, cells or nucleic acid extracts of cells, or biological fluids. The samples used in the above-described methods will vary based on the assay format, the detection method and the nature of the tissues, cells or extracts to be assayed. Methods for preparing nucleic acid extracts of cells are well known in the art and can be readily adapted in order to obtain a sample that is compatible with the method utilized.

[0137] One method of detecting the presence of nucleic acids of the invention in a sample comprises (a) contacting said sample with the above-described nucleic acid probe under conditions such that hybridization occurs, and (b) detecting the presence of said probe bound to said nucleic acid molecule. One skilled in the art would select the nucleic acid probe according to techniques known in the art as described above. Samples to be tested include but should not be limited to RNA samples of human tissue.

[0138] A kit for detecting the presence of nucleic acids of the invention in a sample comprises at least one container means having disposed therein the above-described nucleic acid probe. The kit may further comprise other containers comprising one or more of the following: wash reagents and reagents capable of detecting the presence of bound nucleic acid probe. Examples of detection reagents include, but are not limited to radiolabelled probes, enzymatic labeled probes (horseradish peroxidase, alkaline phosphatase), and affinity labeled probes (biotin, avidin, or steptavidin).

[0139] In detail, a compartmentalized kit includes any kit in which reagents are contained in separate containers. Such containers include small glass containers, plastic containers or strips of plastic or paper. Such containers allow the efficient transfer of reagents from one compartment to another compartment such that the samples and reagents are not cross-contaminated and the agents or solutions of each container can be added in a quantitative fashion from one compartment to another. Such containers will include a container which will accept the test sample, a container which contains the probe or primers used in the assay, containers which contain wash reagents (such as phosphate buffered saline, Tris-buffers, and the like), and containers which contain the reagents used to detect the hybridized probe, bound antibody, amplified product, or the like. One skilled in the art will readily recognize that the nucleic acid probes described in the present invention can readily be incorporated into one of the established kit formats that are well known in the art.

III. DNA Constructs Comprising a Protein Kinase Nucleic Acid Molecule and Cells Containing These Constructs.

[0140] The present invention also relates to a recombinant DNA molecule comprising, 5′ to 3′, a promoter effective to initiate transcription in a host cell and the above-described nucleic acid molecules. In addition, the present invention relates to a recombinant DNA molecule comprising a vector and an above-described nucleic acid molecule. The present invention also relates to a nucleic acid molecule comprising a transcriptional region functional in a cell, a sequence complementary to an RNA sequence encoding an amino acid sequence corresponding to the above-described polypeptide, and a transcriptional termination region functional in said cell. The above-described molecules may be isolated and/or purified DNA molecules.

[0141] The present invention also relates to a cell or organism that contains an above-described nucleic acid molecule and thereby is capable of expressing a polypeptide. The polypeptide may be purified from cells that have been altered to express the polypeptide. A cell is said to be “altered to express a desired polypeptide” when the cell, through genetic manipulation, is made to produce a protein which it normally does not produce or which the cell normally produces at lower levels. One skilled in the art can readily adapt procedures for introducing and expressing either genomic, cDNA, or synthetic sequences into either eukaryotic or prokaryotic cells.

[0142] A nucleic acid molecule, such as DNA, is said to be “capable of expressing” a polypeptide if it contains nucleotide sequences which contain transcriptional and translational regulatory information and such sequences are “operably linked” to nucleotide sequences which encode the polypeptide. An operable linkage is a linkage in which the regulatory DNA sequences and the DNA sequence sought to be expressed are connected in such a way as to permit gene sequence expression. The precise nature of the regulatory regions needed for gene sequence expression may vary from organism to organism, but shall in general include a promoter region which, in prokaryotes, contains both the promoter (which directs the initiation of RNA transcription) as well as the DNA sequences which, when transcribed into RNA, will signal synthesis initiation. Such regions will normally include those 5′-non-coding sequences involved with initiation of transcription and translation, such as the TATA box, capping sequence, CAAT sequence, and the like.

[0143] If desired, the non-coding region 3′ to the sequence encoding a kinase of the invention may be obtained by the above-described methods. This region may be retained for its transcriptional termination regulatory sequences, such as termination and polyadenylation. Thus, by retaining the 3′-region naturally contiguous to the DNA sequence encoding a kinase of the invention, the transcriptional termination signals may be provided. Where the transcriptional termination signals are not satisfactorily functional in the expression host cell, then a 3′ region functional in the host cell may be substituted.

[0144] Two DNA sequences (such as a promoter region sequence and a sequence encoding a kinase of the invention) are said to be operably linked if the nature of the linkage between the two DNA sequences does not (1) result in the introduction of a frame-shift mutation, (2) interfere with the ability of the promoter region sequence to direct the transcription of a gene sequence encoding a kinase of the invention, or (3) interfere with the ability of the gene sequence of a kinase of the invention to be transcribed by the promoter region sequence. Thus, a promoter region would be operably linked to a DNA sequence if the promoter were capable of effecting transcription of that DNA sequence. Thus, to express a gene encoding a kinase of the invention, transcriptional and translational signals recognized by an appropriate host are necessary.

[0145] The present invention encompasses the expression of a gene encoding a kinase of the invention (or a functional derivative thereof) in either prokaryotic or eukaryotic cells. Prokaryotic hosts are, generally, very efficient and convenient for the production of recombinant proteins and are, therefore, one type of preferred expression system for kinases of the invention. Prokaryotes most frequently are represented by various strains of E. coli. However, other microbial strains may also be used, including other bacterial strains.

[0146] In prokaryotic systems, plasmid vectors that contain replication sites and control sequences derived from a species compatible with the host may be used. Examples of suitable plasmid vectors may include pBR322, pUC118, pUC 119 and the like; suitable phage or bacteriophage vectors may include γgt10, γgt11 and the like; and suitable virus vectors may include pMAM-neo, pKRC and the like. Preferably, the selected vector of the present invention has the capacity to replicate in the selected host cell.

[0147] Recognized prokaryotic hosts include bacteria such as E. coli, Bacillus, Streptomyces, Pseudomonas, Salmonella, Serratia, and the like. However, under such conditions, the polypeptide will not be glycosylated. The prokaryotic host must be compatible with the replicon and control sequences in the expression plasmid.

[0148] To express a kinase of the invention (or a functional derivative thereof) in a prokaryotic cell, it is necessary to operably link the sequence encoding the kinase of the invention to a functional prokaryotic promoter. Such promoters may be either constitutive or, more preferably, regulatable (ie., inducible or derepressible). Examples of constitutive promoters include the int promoter of bacteriophage λ, the bla promoter of the β-lactamase gene sequence of pBR322, and the cat promoter of the chloramphenicol acetyl transferase gene sequence of pPR325, and the like. Examples of inducible prokaryotic promoters include the major right and left promoters of bacteriophage λ (P_{L} and P_{R}), the trp, recA, λacZ, λacI, and gal promoters of E. coli, the λ-amylase (Ulmanen et al., J. Bacteriol. 162:176-182, 1985) and the ç-28-specific promoters of B. subtilis (Gilman et al., Gene Sequence 32:11-20, 1984), the promoters of the bacteriophages of Bacillus (Gryczan, In: The Molecular Biology of the Bacilli, Academic Press, Inc., NY, 1982), and Streptomyces promoters (Ward et al., Mol. Gen. Genet. 203:468-478, 1986). Prokaryotic promoters are reviewed by Glick (Ind. Microbiot. 1:277-282, 1987), Cenatiempo (Biochimie 68:505-516, 1986), and Gottesman (Ann. Rev. Genet. 18:415-442, 1984).

[0149] Proper expression in a prokaryotic cell also requires the presence of a ribosome-binding site upstream of the gene sequence-encoding sequence. Such ribosome-binding sites are disclosed, for example, by Gold et al. (Ann. Rev. Microbiol. 35:365-404, 1981). The selection of control sequences, expression vectors, transformation methods, and the like, are dependent on the type of host cell used to express the gene. As used herein, “cell”, “cell line”, and “cell culture” may be used interchangeably and all such designations include progeny. Thus, the words “transformants” or “transformed cells” include the primary subject cell and cultures derived therefrom, without regard to the number of transfers. It is also understood that all progeny may not be precisely identical in DNA content, due to deliberate or inadvertent mutations. However, as defined, mutant progeny have the same functionality as that of the originally transformed cell.

[0150] Host cells which may be used in the expression systems of the present invention are not strictly limited, provided that they are suitable for use in the expression of the kinase polypeptide of interest. Suitable hosts may often include eukaryotic cells. Preferred eukaryotic hosts include, for example, yeast, fungi, insect cells, mammalian cells either in vivo, or in tissue culture. Mammalian cells which may be useful as hosts include HeLa cells, cells of fibroblast origin such as VERO or CHO-K1, or cells of lymphoid origin and their derivatives. Preferred mammalian host cells include SP2/0 and J558L, as well as neuroblastoma cell lines such as IMR 332, which may provide better capacities for correct post-translational processing.

[0151] In addition, plant cells are also available as hosts, and control sequences compatible with plant cells are available, such as the cauliflower mosaic virus 35S and 19S, and nopaline synthase promoter and polyadenylation signal sequences. Another preferred host is an insect cell, for example the Drosophila larvae. Using insect cells as hosts, the Drosophila alcohol dehydrogenase promoter can be used (Rubin, Science 240:1453-1459, 1988). Alternatively, baculovirus vectors can be engineered to express large amounts of kinases of the invention in insect cells (Jasny, Science 238:1653, 1987; Miller et al., In: Genetic Engineering, Vol. 8, Plenum, Setlow et al., eds., pp. 277-297, 1986).

[0152] Any of a series of yeast expression systems can be utilized which incorporate promoter and termination elements from the actively expressed sequences coding for glycolytic enzymes that are produced in large quantities when yeast are grown in mediums rich in glucose. Known glycolytic gene sequences can also provide very efficient transcriptional control signals. Yeast provides substantial advantages in that it can also carry out post-translational modifications. A number of recombinant DNA strategies exist utilizing strong promoter sequences and high copy number plasmids which can be utilized for production of the desired proteins in yeast. Yeast recognizes leader sequences on cloned mammalian genes and secretes peptides bearing leader sequences (i.e., pre-peptides). Several possible vector systems are available for the expression of kinases of the invention in a mammalian host.

[0153] A wide variety of transcriptional and translational regulatory sequences may be employed, depending upon the nature of the host. The transcriptional and translational regulatory signals may be derived from viral sources, such as adenovirus, bovine papilloma virus, cytomegalovirus, simian virus, or the like, where the regulatory signals are associated with a particular gene sequence which has a high level of expression. Alternatively, promoters from mammalian expression products, such as actin, collagen, myosin, and the like, may be employed. Transcriptional initiation regulatory signals may be selected which allow for repression or activation, so that expression of the gene sequences can be modulated. Of interest are regulatory signals which are temperature-sensitive so that by varying the temperature, expression can be repressed or initiated, or are subject to chemical (such as metabolite) regulation.

[0154] Expression of kinases of the invention in eukaryotic hosts requires the use of eukaryotic regulatory regions. Such regions will, in general, include a promoter region sufficient to direct the initiation of RNA synthesis. Preferred eukaryotic promoters include, for example, the promoter of the mouse metallothionein I gene sequence (Hamer et al., J. Mol. Appl. Gen. 1:273-288, 1982); the TK promoter of Herpes virus (McKnight, Cell 31:355-365, 1982); the SV40 early promoter (Benoist et al., Nature (London) 290:304-31, 1981); and the yeast gal4 gene sequence promoter (Johnston et al., Proc. Natl. Acad. Sci. (USA) 79:6971-6975, 1982; Silver et al., Proc. Natl. Acad. Sci. (USA) 81:5951-5955, 1984).

[0155] Translation of eukaryotic mRNA is initiated at the codon that encodes the first methionine. For this reason, it is preferable to ensure that the linkage between a eukaryotic promoter and a DNA sequence which encodes a kinase of the invention (or a functional derivative thereof) does not contain any intervening codons which are capable of encoding a methionine (i.e., AUG). The presence of such codons results either in the formation of a fusion protein (if the AUG codon is in the same reading frame as the kinase of the invention coding sequence) or a frame-shift mutation (if the AUG codon is not in the same reading frame as the kinase of the invention coding sequence).

[0156] A nucleic acid molecule encoding a kinase of the invention and an operably linked promoter may be introduced into a recipient prokaryotic or eukaryotic cell either as a nonreplicating DNA or RNA molecule, which may either be a linear molecule or, more preferably, a closed covalent circular molecule. Since such molecules are incapable of autonomous replication, the expression of the gene may occur through the transient expression of the introduced sequence. Alternatively, permanent expression may occur through the integration of the introduced DNA sequence into the host chromosome.

[0157] A vector may be employed which is capable of integrating the desired gene sequences into the host cell chromosome. Cells which have stably integrated the introduced DNA into their chromosomes can be selected by also introducing one or more markers which allow for selection of host cells which contain the expression vector. The marker may provide for prototrophy to an auxotrophic host, biocide resistance, e.g., antibiotics, or heavy metals, such as copper, or the like. The selectable marker gene sequence can either be directly linked to the DNA gene sequences to be expressed, or introduced into the same cell by co-transfection. Additional elements may also be needed for optimal synthesis of mRNA. These elements may include splice signals, as well as transcription promoters, enhancers, and termination signals. cDNA expression vectors incorporating such elements include those described by Okayama (Mol. Cell. Biol. 3:280-, 1983).

[0158] The introduced nucleic acid molecule can be incorporated into a plasmid or viral vector capable of autonomous replication in the recipient host. Any of a wide variety of vectors may be employed for this purpose. Factors of importance in selecting a particular plasmid or viral vector include: the ease with which recipient cells that contain the vector may be recognized and selected from those recipient cells which do not contain the vector, the number of copies of the vector which are desired in a particular host; and whether it is desirable to be able to “shuttle” the vector between host cells of different species.

[0159] Preferred prokaryotic vectors include plasmids such as those capable of replication in E. coli (such as, for example, pBR322, ColEl, pSC101, pACYC 184, πVX; “Molecular Cloning: A Laboratory Manual”, 1989, supra). Bacillus plasmids include pC194, pC221, pT127, and the like (Gryczan, In: The Molecular Biology of the Bacilli, Academic Press, NY, pp. 307-329, 1982). Suitable Streptomyces plasmids include p1J101 (Kendall et al., J. Bacteriol. 169:41774183, 1987), and streptomyces bacteriophages such as φC31 (Chater et al., In: Sixth International Symposium on Actinomycetales Biology, Akademiai Kaido, Budapest, Hungary, pp. 45-54, 1986). Pseudomonas plasmids are reviewed by John et al. (Rev. Infect. Dis. 8:693-704, 1986), and Izaki (Jpn. J. Bacteriol. 33:729-742, 1978).

[0160] Preferred eukaryotic plasmids include, for example, BPV, vaccinia, SV40, 2-micron circle, and the like, or their derivatives. Such plasmids are well known in the art (Botstein et al., Miarni Wntr. Symp. 19:265-274, 1982; Broach, In: “The Molecular Biology of the Yeast Saccharomyces: Life Cycle and Inheritance”, Cold Spring Harbor Laboratory, Cold Spring Harbor, N.Y., p. 445-470, 1981; Broach, Cell 28:203-204, 1982; Bollon et al., J. Clin. Hematol. Oncol. 10:39-48, 1980; Maniatis, In: Cell Biology: A Comprehensive Treatise, Vol. 3, Gene Sequence Expression, Academic Press, N.Y., pp. 563-608, 1980).

[0161] Once the vector or nucleic acid molecule containing the construct(s) has been prepared for expression, the DNA construct(s) may be introduced into an appropriate host cell by any of a variety of suitable means, i.e., transformation, transfection, conjugation, protoplast fusion, electroporation, particle gun technology, calcium phosphate-precipitation, direct microinjection, and the like. After the introduction of the vector, recipient cells are grown in a selective medium, which selects for the growth of vector-containing cells. Expression of the cloned gene(s) results in the production of a kinase of the invention, or fragments thereof. This can take place in the transformed cells as such, or following the induction of these cells to differentiate (for example, by administration of bromodeoxyuracil to neuroblastoma cells or the like). A variety of incubation conditions can be used to form the peptide of the present invention. The most preferred conditions are those which mimic physiological conditions.

IV. The Proteins of the Invention

[0162] A variety of methodologies known in the art can be utilized to obtain the polypeptides of the present invention. The polypeptides may be purified from tissues or cells that naturally produce the polypeptides. Alternatively, the above-described isolated nucleic acid fragments could be used to express the kinases of the invention in any organism. The samples of the present invention include cells, protein extracts or membrane extracts of cells, or biological fluids. The samples will vary based on the assay format, the detection method, and the nature of the tissues, cells or extracts used as the sample.

[0163] Any eukaryotic organism can be used as a source for the polypeptides of the invention, as long as the source organism naturally contains such polypeptides. As used herein, “source organism” refers to the original organism from which the amino acid sequence of the subunit is derived, regardless of the organism the subunit is expressed in and ultimately isolated from.

[0164] One skilled in the art can readily follow known methods for isolating proteins in order to obtain the polypeptides free of natural contaminants. These include, but are not limited to: size-exclusion chromatography, HPLC, ion-exchange chromatography, and immuno-affinity chromatography.

[0165] Further, the polypeptides of the invention include the full-length polypeptides that can be identified from the full-length or partial sequences encoded by SEQ ID NO:122, SEQ ID NO:123, SEQ ID NO:124, SEQ ID NO:125, SEQ ID NO:126, SEQ ID NO:127, SEQ ID NO:128, SEQ ID NO:129, SEQ ID NO:130, SEQ ID NO:131, SEQ ID NO:132, SEQ ID NO:133, SEQ ID NO:134, SEQ ID NO:135, SEQ ID NO:136, SEQ ID NO:137, SEQ ID NO:138, SEQ ID NO:139, SEQ ID NO:140, SEQ ID NO:141, SEQ ID NO:142, SEQ ID NO:143, SEQ ID NO:144, SEQ ID NO:145, SEQ ID NO:146, SEQ ID NO:147, SEQ ID NO:148, SEQ ID NO:149, SEQ ID NO:150, SEQ ID NO:151, SEQ ID NO:152, SEQ ID NO:153, SEQ ID NO:154, SEQ ID NO:155, SEQ ID NO:156, SEQ ID NO:157, SEQ ID NO:158, SEQ ID NO:159, SEQ ID NO:160, SEQ ID NO:161, SEQ ID NO:162, SEQ ID NO:163, SEQ ID NO:164, SEQ ID NO:165. SEQ ID NO:166, SEQ ID NO:167, SEQ ID NO:168, SEQ ID NO:169, SEQ ID NO:170, SEQ ID NO:171, SEQ ID NO:172, SEQ ID NO:173, SEQ ID NO:174, SEQ ID NO:175, SEQ ID NO:176, SEQ ID NO:177, SEQ ID NO:178, SEQ ID NO:179, SEQ ID NO:180, SEQ ID NO:181, SEQ ID NO:182, SEQ ID NO:183, SEQ ID NO:184, SEQ ID NO:185, SEQ ID NO:186, SEQ ID NO:187, SEQ ID NO:188, SEQ ID NO:189, SEQ ID NO:190, SEQ ID NO:191, SEQ ID NO:199, SEQ ID NO:193, SEQ ID NO:194, SEQ ID NO:195, SEQ ID NO:196, SEQ ID NO:197, SEQ ID NO:198, SEQ ID NO:199, SEQ ID NO:200, SEQ ID NO:201, SEQ ID NO:202, SEQ ID NO:203, SEQ ID NO:204, SEQ ID NO:205, SEQ ID NO:206, SEQ ID NO:207, SEQ ID NO:208, SEQ ID NO:209, SEQ ID NO:210, SEQ ID NO:211, SEQ ID NO:212, SEQ ID NO:213, SEQ ID NO:214, SEQ ID NO:215, SEQ ID NO:216, SEQ ID NO:217, SEQ ID NO:218, SEQ ID NO:219, SEQ ID NO:220, SEQ ID NO:221, SEQ ID NO:222, SEQ ID NO:223, SEQ ID NO:224, SEQ ID NO:225, SEQ ID NO:226, SEQ ID NO:227, SEQ ID NO:228, SEQ ID NO:229, SEQ ID NO:230, SEQ ID NO:231, SEQ ID NO:232, SEQ ID NO:233, SEQ ID NO:234, SEQ ID NO:235, SEQ ID NO:236, SEQ ID NO:237, SEQ ID NO:238, SEQ ID NO:239, SEQ ID NO:240, SEQ ID NO:241, and SEQ ID NO:242 (FIG. 1). In addition, the polypeptides of the invention include the domains of these polypeptides, including, but not limited to, the N-terminal, kinase/catalytic, and C-terminal domains.

[0166] The characteristics of the protein kinase nucleic acid sequences of the invention are provided in Table 1. The protein kinases fall into 10 known groups: AGC, CAMK, CKI, CMGC, dsPK, EIFK, LIMK, MLK, STE and TY, In addition, there are a significant number of protein kinases that do not belong to any of the known groups, and therefore presumably define new protein kinase groups.

[0167] Additional characteristics are shown in, inter alia, the tables, namely Table 1, Table 2, Table 3 and Table 4, provided below.

V. Antibodies. Hybridomas, Methods of Use and Kits for Detection of Protein Kinases

[0168] The present invention relates to an antibody having binding affinity to a kinase of the invention. The polypeptide may have an amino acid sequence selected from the group consisting of those set forth in SEQ ID NO:122, SEQ ID NO:123, SEQ ID NO:124, SEQ ID NO:125, SEQ ID NO:126, SEQ ID NO:127, SEQ ID NO:128, SEQ ID NO:129, SEQ ID NO:130, SEQ ID NO:131, SEQ ID NO:132, SEQ ID NO:133, SEQ ID NO:134, SEQ ID NO:135, SEQ ID NO:136, SEQ ID NO:137, SEQ ID NO:138, SEQ ID NO:139, SEQ ID NO:140, SEQ ID NO:141, SEQ ID NO:142, SEQ ID NO:143, SEQ ID NO:144, SEQ ID NO:145, SEQ ID NO:146, SEQ ID NO:147, SEQ ID NO:148, SEQ ID NO:149, SEQ ID NO:150, SEQ ID NO:151, SEQ ID NO:152, SEQ ID NO:153, SEQ ID NO:154, SEQ ID NO:155, SEQ ID NO:156, SEQ ID NO:157, SEQ ID NO:158, SEQ ID NO:159, SEQ ID NO:160, SEQ ID NO:161, SEQ ID NO:162, SEQ ID NO:163, SEQ ID NO:164, SEQ ID NO:165. SEQ ID NO:166, SEQ ID NO:167, SEQ ID NO:168, SEQ ID NO:169, SEQ ID NO:170, SEQ ID NO:171, SEQ ID NO:172, SEQ ID NO:173, SEQ ID NO:174, SEQ ID NO:175, SEQ ID NO:176, SEQ ID NO:177, SEQ ID NO:178, SEQ ID NO:179, SEQ ID NO:180, SEQ ID NO:181, SEQ ID NO:182, SEQ ID NO:183, SEQ ID NO:184, SEQ ID NO:185, SEQ ID NO:186, SEQ ID NO:187, SEQ ID NO:188, SEQ ID NO:189, SEQ ID NO:190, SEQ ID NO:191, SEQ ID NO:199, SEQ ID NO:193, SEQ ID NO:194, SEQ ID NO:195, SEQ ID NO:196, SEQ ID NO:197, SEQ ID NO:198, SEQ ID NO:199, SEQ ID NO:200, SEQ ID NO:201, SEQ ID NO:202, SEQ ID NO:203, SEQ ID NO:204, SEQ ID NO:205, SEQ ID NO:206, SEQ ID NO:207, SEQ ID NO:208, SEQ ID NO:209, SEQ ID NO:210, SEQ ID NO:211, SEQ ID NO:212, SEQ ID NO:213, SEQ ID NO:214, SEQ ID NO:215, SEQ ID NO:216, SEQ ID NO:217, SEQ ID NO:218, SEQ ID NO:219, SEQ ID NO:220, SEQ ID NO:221, SEQ ID NO:222, SEQ ID NO:223, SEQ ID NO:224, SEQ ID NO:225, SEQ ID NO:226, SEQ ID NO:227, SEQ ID NO:228, SEQ ID NO:229, SEQ ID NO:230, SEQ ID NO:231, SEQ ID NO:232, SEQ ID NO:233, SEQ ID NO:234, SEQ ID NO:235, SEQ ID NO:236, SEQ ID NO:237, SEQ ID NO:238, SEQ ID NO:239, SEQ ID NO:240, SEQ ID NO:241, and SEQ ID NO:242, or a functional derivative thereof, or at least 9 contiguous amino acids thereof (preferably, at least 20, 30, 35, or 40 or more contiguous amino acids thereof). Alternatively, the antibody may bind to a part of the polypeptide not provided in the sequences above, but that is present in the full-length sequence of the polypeptide and that is easily obtained using methods standard in the art. Further, the antibody may bind specifically to particular domains of one or more of the kinases of the invention, including, but not limited to, the N-terminal, kinase/catalytic, or C-terminal domains.

[0169] The present invention also relates to an antibody having specific binding affinity to a kinase or kinase domain of the invention. Such an antibody may be isolated by comparing its binding affinity to a kinase of the invention with its binding affinity to other polypeptides. Those that bind selectively to a kinase of the invention would be chosen for use in methods requiring a distinction between a kinase of the invention and other polypeptides. Such methods could include, but should not be limited to, the analysis of altered kinase expression in tissue containing other polypeptides.

[0170] The kinases of the present invention can be used in a variety of procedures and methods, such as for the generation of antibodies, for use in identifying pharmaceutical compositions, and for studying DNA/protein interaction.

[0171] The kinases of the present invention can be used to produce antibodies or hybridomas. One skilled in the art will recognize that if an antibody is desired, such a peptide could be generated as described herein and used as an immunogen. The antibodies of the present invention include monoclonal and polyclonal antibodies, as well fragments of these antibodies, and humanized forms. Humanized forms of the antibodies of the present invention may be generated using one of the procedures known in the art such as chimerization or CDR grafting.

[0172] The present invention also relates to a hybridoma that produces the above-described monoclonal antibody, or binding fragment thereof A hybridoma is an immortalized cell line that is capable of secreting a specific monoclonal antibody.

[0173] In general, techniques for preparing monoclonal antibodies and hybridomas are well known in the art (Campbell, “Monoclonal Antibody Technology: Laboratory Techniques in Biochemistry and Molecular Biology,” Elsevier Science Publishers, Amsterdam, The Netherlands, 1984; St. Groth et al., J. Immunol. Methods 35:1-21, 1980). Any animal (mouse, rabbit, and the like) which is known to produce antibodies can be immunized with the selected polypeptide. Methods for immunization are well known in the art. Such methods include subcutaneous or intraperitoneal injection of the polypeptide. One skilled in the art will recognize that the amount of polypeptide used for immunization will vary based on the animal that is immunized, the antigenicity of the polypeptide and the site of injection.

[0174] The polypeptide may be modified or administered in an adjuvant in order to increase the peptide antigenicity. Methods of increasing the antigenicity of a polypeptide are well known in the art. Such procedures include coupling the antigen with a heterologous protein (such as globulin or β-galactosidase) or through the inclusion of an adjuvant during immunization.

[0175] For monoclonal antibodies, spleen cells from the immunized animals are removed, fused with myeloma cells, such as SP2/0-Ag14 myeloma cells, and allowed to become monoclonal antibody producing hybridoma cells. Any one of a number of methods well known in the art can be used to identify the hybridoma cell that produces an antibody with the desired characteristics. These include screening the hybridomas with an ELISA assay, western blot analysis, or radioimmunoassay (Lutz et al., Exp. Cell Res. 175:109-124, 1988). Hybridomas secreting the desired antibodies are cloned and the class and subclass are determined using procedures known in the art (Campbell, “Monoclonal Antibody Technology: Laboratory Techniques in Biochemistry and Molecular Biology”, supra, 1984).

[0176] For polyclonal antibodies, antibody-containing antisera is isolated from the immunized animal and is screened for the presence of antibodies with the desired specificity using one of the above-described procedures. The above-described antibodies may be detectably labeled. Antibodies can be detectably labeled through the use of radioisotopes, affinity labels (such as biotin, avidin, and the like), enzymatic labels (such as horse radish peroxidase, alkaline phosphatase, and the like) fluorescent labels (such as FITC or rhodamine, and the like), paramagnetic atoms, and the like. Procedures for accomplishing such labeling are well-known in the art, for example, see Stemberger et al., J. Histochem. Cytochem. 18:315, 1970; Bayer et al., Meth. Enzym. 62:308-, 1979; Engval et al., Immunol. 109:129-, 1972; Goding, J. Immunol. Meth. 13:215-, 1976. The labeled antibodies of the present invention can be used for in vitro, in vivo, and in situ assays to identify cells or tissues that express a specific peptide.

[0177] The above-described antibodies may also be immobilized on a solid support. Examples of such solid supports include plastics such as polycarbonate, complex carbohydrates such as agarose and sepharose, acrylic resins and such as polyacrylamide and latex beads. Techniques for coupling antibodies to such solid supports are well known in the art (Weir et al., “Handbook of Experimental Immunology” 4th Ed., Blackwell Scientific Publications, Oxford, England, Chapter 10, 1986; Jacoby et al., Meth. Enzym. 34, Academic Press, N.Y., 1974). The immobilized antibodies of the present invention can be used for in vitro, in vivo, and in situ assays as well as in immunochromotography.

[0178] Furthermore, one skilled in the art can readily adapt currently available procedures, as well as the techniques, methods and kits disclosed herein with regard to antibodies, to generate peptides capable of binding to a specific peptide sequence in order to generate rationally designed antipeptide peptides (Hurby et al., “Application of Synthetic Peptides: Antisense Peptides”, In Synthetic Peptides, A User's Guide, W. H. Freeman, NY, pp. 289-307, 1992; Kaspczak et al., Biochemistry 28:9230-9238, 1989).

[0179] Anti-peptide peptides can be generated by replacing the basic amino acid residues found in the peptide sequences of the kinases of the invention with acidic residues, while maintaining hydrophobic and uncharged polar groups. For example, lysine, arginine, and/or histidine residues are replaced with aspartic acid or glutarnic acid and glutamic acid residues are replaced by lysine, arginine or histidine.

[0180] The present invention also encompasses a method of detecting a kinase polypeptide in a sample, comprising: (a) contacting the sample with an above-described antibody, under conditions such that immunocomplexes form, and (b) detecting the presence of said antibody bound to the polypeptide. In detail, the methods comprise incubating a test sample with one or more of the antibodies of the present invention and assaying whether the antibody binds to the test sample. Altered levels of a kinase of the invention in a sample as compared to normal levels may indicate disease.

[0181] Conditions for incubating an antibody with a test sample vary. Incubation conditions depend on the format employed in the assay, the detection methods employed, and the type and nature of the antibody used in the assay. One skilled in the art will recognize that any one of the commonly available immunological assay formats (such as radioimmunoassays, enzyme-linked immunosorbent assays, diffusion based Ouchterlony, or rocket immunofluorescent assays) can readily be adapted to employ the antibodies of the present invention. Examples of such assays can be found in Chard (“An Introduction to Radioimmunoassay and Related Techniques” Elsevier Science Publishers, Amsterdam, The Netherlands, 1986), Bullock et al. (“Techniques in Immunocytochemistry,” Academic Press, Orlando, Fla. Vol. 1, 1982; Vol. 2, 1983; Vol. 3, 1985), Tijssen (“Practice and Theory of Enzyme Immunoassays: Laboratory Techniques in Biochemistry and Molecular Biology,” Elsevier Science Publishers, Amsterdam, The Netherlands, 1985).

[0182] The immunological assay test samples of the present invention include cells, protein or membrane extracts of cells, or biological fluids such as blood, serum, plasma, or urine. The test samples used in the above-described method will vary based on the assay format, nature of the detection method and the tissues, cells or extracts used as the sample to be assayed. Methods for preparing protein extracts or membrane extracts of cells are well known in the art and can be readily be adapted in order to obtain a sample which is testable with the system utilized.

[0183] A kit contains all the necessary reagents to carry out the previously described methods of detection. The kit may comprise: (i) a first container means containing an above-described antibody, and (ii) second container means containing a conjugate comprising a binding partner of the antibody and a label. In another preferred embodiment, the kit further comprises one or more other containers comprising one or more of the following: wash reagents and reagents capable of detecting the presence of bound antibodies.

[0184] Examples of detection reagents include, but are not limited to, labeled secondary antibodies, or in the alternative, if the primary antibody is labeled, the chromophoric, enzymatic, or antibody binding reagents that are capable of reacting with the labeled antibody. The compartmentalized kit may be as described above for nucleic acid probe kits. One skilled in the art will readily recognize that the antibodies described in the present invention can readily be incorporated into one of the established kit formats that are well known in the art.

VI. Isolation of Compounds That Interact With Protein Kinases

[0185] The present invention also relates to a method of detecting a compound capable of binding to a protein kinase of the invention, comprising incubating the compound with a kinase of the invention and detecting the presence of the compound bound to the kinase. The compound may be present within a complex mixture, for example, serum, body fluid, or cell extracts.

[0186] The present invention also relates to a method of detecting an agonist or antagonist of kinase activity or kinase binding partner activity comprising incubating cells that produce a kinase of the invention in the presence of a compound and detecting changes in the level of kinase activity or kinase binding partner activity. The compounds thus identified would produce a change in activity indicative of the presence of the compound. The compound may be present within a complex mixture, for example, serum, body fluid, or cell extracts. Once the compound is identified it can be isolated using techniques well known in the art.

[0187] The present invention also encompasses a method of agonizing (stimulating) or antagonizing kinase associated activity in a mammal comprising administering to said mammal an agonist or antagonist to a kinase of the invention in an amount sufficient to effect said agonism or antagonism. A method of treating diseases in a mammal with an agonist or antagonist of kinase activity comprising administering the agonist or antagonist to a mammal in an amount sufficient to agonize or antagonize kinase associated functions is also encompassed in the present application.

[0188] In an effort to discover novel treatments for diseases, biomedical researchers and chemists have designed, synthesized, and tested molecules that inhibit the function of protein kinases. Some small organic molecules form a class of compounds that modulate the function of protein kinases. Examples of molecules that have been reported to inhibit the function of protein kinases include, but are not limited to, bis monocyclic, bicyclic or heterocyclic aryl compounds (PCT WO 92120642, published Nov. 26, 1992 by Maguire et al.), vinylene-azaindole derivatives (PCT WO 94/14808, published Jul. 7, 1994 by Ballinari et al.), 1-cyclopropyl-4-pyridyl-quinolones (U.S. Pat. No. 5,330,992), styryl compounds (U.S. Pat. No. 5,217,999), styryl-substituted pyridyl compounds (U.S. Pat. No. 5,302,606), certain quinazoline derivatives (EP Application No. 0 566 266 A1), seleoindoles and selenides (PCT WO 94/03427, published Feb. 17, 1994 by Denny et al.), tricyclic polyhydroxylic compounds (PCT WO 92/21660, published Dec. 10, 1992 by Dow), and benzylphosphonic acid compounds (PCT WO 91/15495, published Oct. 17, 1991 by Dow et al).

[0189] Compounds that can traverse cell membranes and are resistant to acid hydrolysis are potentially advantageous as therapeutics as they can become highly bioavailable after being administered orally to patients. However, many of these protein kinase inhibitors only weakly inhibit the function of protein kinases. In addition, many inhibit a variety of protein kinases and will cause multiple side-effects as therapeutics for diseases.

[0190] Some indolinone compounds, however, form classes of acid resistant and membrane permeable organic molecules. WO 96/22976 (published Aug. 1, 1996 by Ballinari et al.) describes hydrosoluble indolinone compounds that harbor tetralin, naphthalene, quinoline, and indole substituents fused to the oxindole ring. These bicyclic substituents are in turn substituted with polar moieties including hydroxylated alkyl, phosphate, and ether moieties. U.S. patent application Ser. No. 08/702,232, filed Aug. 23, 1996, entitled “Indolinone Combinatorial Libraries and Related Products and Methods for the Treatment of Disease” by Tang et al. (Lyon & Lyon Docket No. 221/187) and Ser. No. 08/485,323, filed Jun. 7, 1995, entitled “Benzylidene-Z-Indoline Compounds for the Treatment of Disease” by Tang et al. (Lyon & Lyon Docket No. 223/298) and International Patent Publication WO 96/22976, published Aug. 1, 1996 by Ballinari et al., all of which are incorporated herein by reference in their entirety, including any drawings, describe indolinone chemical libraries of indolinone compounds harboring other bicyclic moieties as well as monocyclic moieties fused to the oxindole ring. Applications Ser. No. 08/702,232, filed Aug. 23, 1996, entitled “Indolinone Combinatorial Libraries and Related Products and Methods for the Treatment of Disease” by Tang et al. (Lyon & Lyon Docket No. 221/187), Ser. No. 08/485,323, filed Jun. 7, 1995, entitled “Benzylidene-Z-Indoline Compounds for the Treatment of Disease” by Tang et al. (Lyon & Lyon Docket No. 223/298), and WO 96/22976, published Aug. 1, 1996 by Ballinari et al teach methods of indolinone synthesis, methods of testing the biological activity of indolinone compounds in cells, and inhibition patterns of indolinone derivatives.

[0191] Other examples of substances capable of modulating kinase activity include, but are not limited to, tyrphostins, quinazolines, quinoxolines, and quinolines. The quinazolines, tyrphostins, quinolines, and quinoxolines referred to above include well known compounds such as those described in the literature. For example, representative publications describing quinazolines include Barker et al., EPO Publication No. 0 520 722 A1; Jones et al., U.S. Pat. No.4,447,608; Kabbe et al., U.S. Pat. No. 4,757,072; Kaul and Vougioukas, U.S. Pat. No. 5, 316,553; Kreighbaum and Comer, U.S. Pat. No. 4,343,940; Pegg and Wardleworth, EPO Publication No. 0 562 734 A1; Barker et al., Proc. of Am. Assoc. for Cancer Research 32:327 (1991); Bertino, J. R, Cancer Research 3:293-304 (1979); Bertino, J. R., Cancer Research 9(2 part 1):293-304 (1979); Curtin te al., Br. J. Cancer 53:361-368 (1986); Fernandes et al., Cancer Research 43:1117-1123 (1983); Ferris et al. J. Org. Chem. 44(2):173-178; Fry et al., Science 265:1093-1095 (1994); Jackman et al., Cancer Research 51:5579-5586 (1981); Jones et al. J. Med. Chem. 29(6):1114-1118; Lee and Skibo, Biochemistry 26(23):7355-7362 (1987); Lemus et al., J. Org. Chem. 54:3511-3518 (1989); Ley and Seng, Synthesis 1975:415-522 (1975); Maxwell et al., Magnetic Resonance in Medicine 17:189-196 (1991); Mini et al., Cancer Research 45:325-330 (1985); Phillips and Castle, J. Heterocyclic Chem. 17(19):1489-1596 (1980); Reece et al., Cancer Research 47(11):2996-2999 (1977); Sculier et al., Cancer Immunol. and Immunother. 23:A65 (1986); Sikora et al., Cancer Letters 23:289-295 (1984); Sikora et al., Analytical Biochem. 172:344-355 (1988); all of which are incorporated herein by reference in their entirety, including any drawings.

[0192] Quinoxaline is described in Kaul and Vougioukas, U.S. Pat. No. 5,316,553, incorporated herein by reference in its entirety, including any drawings.

[0193] Quinolines are described in Dolle et al., J. Med. Chem. 37:2627-2629 (1994); MaGuire, J. Med. Chem. 37:2129-2131 (1994); Burke et al., J. Med. Chem. 36:425-432 (1993); and Burke et al. BioOrganic Med. Chem. Letters 2:1771-1774 (1992), all of which are incorporated by reference in their entirety, including any drawings.

[0194] Tyrphostins are described in Allen et al., Clin. Exp. Immunol. 91:141-156 (1993); Anafi et al., Blood 82:12:3524-3529 (1993); Baker et al., J. Cell Sci. 102:543-555 (1992); Bilder et al., Amer. Physiol. Soc. pp. 6363-6143:C721-C730 (1991); Brunton et al., Proceedings of Amer. Assoc. Cancer Rsch. 33:558 (1992); Bryckaert et al., Experimental Cell Research 199:255-261 (1992); Dong et al., J. Leukocyte Biology 53:53-60 (1993); Dong et al, J. Immunol. 151(5):2717-2724 (1993); Gazit et al., J. Med. Chem. 32:2344-2352 (1989); Gazit et al., “J. Med. Chem. 36:3556-3564 (1993); Kaur et al., Anti-Cancer Drugs 5:213-222 (1994); Kaur et al., King et al., Biochem. J. 275:413-418 (1991); Kuo et al., Cancer Letters 74:197-202 (1993); Levitzki, A., The FASEB J. 6:3275-3282 (1992); Lyall et al., J. Biol. Chem. 264:14503-14509 (1989); Peterson et al., The Prostate 22:335-345 (1993); Pillemer et al., Int. J. Cancer 50:80-85 (1992); Posner et al., Molecular Pharmacology 45:673-683 (1993); Rendu et al., Biol. Pharmacology 44(5):881-888 (1992); Sauro and Thomas, Life Sciences 53:371-376 (1993); Sauro and Thomas, J. Pharm. and Experimental Therapeutics 267(3):119-1125 (1993); Wolbring et al., J. Biol. Chem. 269(36):22470-22472 (1994); and Yoneda et al., Cancer Research 51:4430-4435 (1991); all of which are incorporated herein by reference in their entirety, including any drawings.

[0195] Other compounds that could be used as modulators include oxindolinones such as those described in U.S. patent application Ser. No. 08/702,232 filed Aug. 23, 1996, incorporated herein by reference in its entirety, including any drawings.

VII. Biological Significance, Applications and Clinical Relevance of Novel Protein Kinases

[0196] For each protein kinase in this application, we provide a classification of the protein class and family to which it belongs, a summary of non-cataltyic protein motifs, a profile of its expression in several hundred tissue and cell sources, and a chromosomal location. This information can be used to suggest potential function, regulation or therapeutic utility for each of the proteins.

[0197] The kinase classification and protein domains often reflect pathways, cellular roles, or mechanisms of up- or down-stream regulation. Also disease-relevant genes often occur in families of related genes. For example if one member of a kinase family functions as an oncogene, a tumor suppressor, or has been found to be disrupted in an immune, neurologic, cardiovascular, or metabolic disorder, frequently other family members may play a related role.

[0198] The expression analysis organizes kinases into groups that are transcriptionally upregulated in tumors and those that are more restricted to specific tumor types such as melanoma or prostate. This analysis also identifies genes that are regulated in a cell cycle dependent manner, and are therefore likely to be involved in maintaining cell cycle checkpoints, entry, progression, or exit from mitosis, oversee DNA repair, or are involved in cell proliferation and genome stability. Expression data also can identify genes expressed in endothelial sources or other tissues that suggest a role in angiogenesis, thereby implicating them as targets for control of diseases that have an angiogenic component, such as cancer, endometriosis, retinopathy and macular degeneration, and various ischemic or vascular pathologies. A proteins' role in cell survival can also be suggested based on restricted expression in cells subjected to external stress such as oxidative damage, hypoxia, drugs such as cisplatinum, or irradiation. Metastases-associated genes can be implicated when expression is restricted to invading regions of a tumor, or is only seen in local or distant metastases compared to the primary tumor, or when a gene is upregulated during cell culture models of invasion, migration, or motility.

[0199] Chromosomal location can identify candidate targets for a tumor amplicon or a tumor-suppressor locus. Summaries of prevelant tumor amplicons are available in the literature, and can identify tumor types to experimentally be confirmed to contain amplified copies of a kinase gene which localizes to an adjacent region.

[0200] Based on these criteria several kinases immediately stand out as being of potential therapeutic relevance. The protein kinases can be divided into the following disease-relevant categories (nucleotide Seq ID #s in parentheses):

[0201] Tumor associated: Mok (SEQ ID NO:NO:57), EPK2, AA316804 (SEQ ID NO:11), AA435956 (SEQ ID NO:NO:48), AA278842 (SEQ ID NO:88), AA599286 (SEQ ID NO:89), AA826850 (SEQ ID NO:3), HRI (SEQ ID NO:73), MLK4 AA232253 (SEQ ID NO:82), AA883975 SGK 235 (SEQ ID NO:95), AA311714 (SEQ ID NO:101), MPSK1 (SEQ ID NO:110), R19609 (Seq ID111), AA383293 (SEQ ID NO:26).

[0202] Prostate-specific: AA234451 (SEQ ID NO:47), TSK4 (SEQ ID NO:93), RIP4 (SEQ ID NO:84), KIAA0965 (SEQ ID NO:8).

[0203] Oncogenic or proliferation associated: KIAA0781 (SEQ ID NO:38), AA789239 (SEQ ID NO:52), CCRK (SEQ ID NO:54), CLK4 (SEQ ID NO:55), H85389 (SEQ ID NO:97).

[0204] Neuronal restricted: CAMKKB (SEQ ID NO:66)

[0205] Hematopoietic expressed: PTK9L (SEQ ID NO:22), DRAK2 (SEQ ID NO:29), AI025291 (SEQ ID NO:94)

[0206] Angiogenic or endothelial expressed: DRAK1 (SEQ ID NO:31), MAK-V (SEQ ID NO:40), TRAD (SEQ ID NO:44), MOK (SEQ ID NO:57), AA08847 (SEQ ID NO:78), HGP_{—}66444466 (SEQ ID NO:79), RSK4 (SEQ ID NO:16).

[0207] Cell cycle regulated: AA454060 (SEQ ID NO:45), KIAA0999 (Mitotic—SEQ ID NO:32), AA579641 (Mitotic—SEQ ID NO:60), AA305176 (Mitotic—SEQ ID NO:6), AA018361 (S1 phase—SEQ ID NO:100).

VIII. Transgenic Animals.

[0208] A variety of methods are available for the production of transgenic animals associated with this invention. DNA can be injected into the pronucleus of a fertilized egg before fusion of the male and female pronuclei, or injected into the nucleus of an embryonic cell (e.g., the nucleus of a two-cell embryo) following the initiation of cell division (Brinster et al., Proc. Nat. Acad. Sci. USA 82: 4438-4442, 1985) Embryos can be infected with viruses, especially retroviruses, modified to carry inorganic-ion receptor nucleotide sequences of the invention.

[0209] Pluripotent stem cells derived from the inner cell mass of the embryo and stabilized in culture can be manipulated in culture to incorporate nucleotide sequences of the invention. A transgenic animal can be produced from such cells through implantation into a blastocyst that is implanted into a foster mother and allowed to come to term. Animals suitable for tansgenic experiments can be obtained from standard commercial sources such as Charles River (Wilmington, Mass.), Taconic (Germantown, N.Y.), Harlan Sprague Dawley (Indianapolis, Ind.), etc.

[0210] The procedures for manipulation of the rodent embryo and for microinjection of DNA into the pronucleus of the zygote are well known to those of ordinary skill in the art (Hogan et al., supra). Microinjection procedures for fish, amphibian eggs and birds are detailed in Houdebine and Chourrout (Experientia 47: 897-905, 1991). Other procedures for introduction of DNA into tissues of animals are described in U.S. Pat. No. 4,945,050 (Sanford el al., Jul. 30, 1990).

[0211] By way of example only, to prepare a transgenic mouse, female mice are induced to superovulate. Females are placed with males, and the mated females are sacrificed by CO₂ asphyxiation or cervical dislocation and embryos are recovered from excised oviducts. Surrounding cumulus cells are removed. Pronuclear embryos are then washed and stored until the time of injection. Randomly cycling adult female mice are paired with vasectomized males. Recipient females are mated at the same time as donor females. Embryos then are transferred surgically. The procedure for generating transgenic rats is similar to that of mice (Hammer et al., Cell 63:1099-1112, 1990).

[0212] Methods for the culturing of embryonic stem (ES) cells and the subsequent production of transgenic animals by the introduction of DNA into ES cells using methods such as electroporation, calcium phosphate/DNA precipitation and direct injection also are well known to those of ordinary skill in the art (Teratocarcinomas and Embryonic Stem Cells, A Practical Approach, E.J. Robertson, ed., JRL Press, 1987).

[0213] In cases involving random gene integration, a clone containing the sequence(s) of the invention is co-transfected with a gene encoding resistance. Alternatively, the gene encoding neomycin resistance is physically linked to the sequence(s) of the invention. Transfection and isolation of desired clones are carried out by any one of several methods well known to those of ordinary skill in the art (E. J. Robertson, supra).

[0214] DNA molecules introduced into ES cells can also be integrated into the chromosome through the process of homologous recombination (Capecchi, Science 244: 1288-1292, 1989). Methods for positive selection of the recombination event (i.e., neo resistance) and dual positive-negative selection (i.e., neo resistance and gancyclovir resistance) and the subsequent identification of the desired clones by PCR have been described by Capecchi, supra and Joyner et al. (Nature 338: 153-156, 1989), the teachings of which are incorporated herein in their entirety including any drawings. The final phase of the procedure is to inject targeted ES cells into blastocysts and to transfer the blastocysts into pseudopregnant females. The resulting chimeric animals are bred and the offspring are analyzed by Southern blotting to identify individuals that carry the transgene. Procedures for the production of non-rodent mammals and other animals have been discussed by others (Houdebine and Chourrout, supra; Pursel et al., Science 244:1281 -1288, 1989; and Simms et al., Bio/Technology 6:179-183, 1988).

[0215] Thus, the invention provides transgenic, nonhuman mammals containing a transgene encoding a kinase of the invention or a gene effecting the expression of the kinase. Such transgenic nonhuman mammals are particularly useful as an in vivo test system for studying the effects of introduction of a kinase, or regulating the expression of a kinase (ie., through the introduction of additional genes, antisense nucleic acids, or ribozymes).

[0216] A “Transgenic animal” is an animal having cells that contain DNA which has been artificially inserted into a cell, which DNA becomes part of the genome of the animal which develops from that cell. Preferred transgenic animals are primates, mice, rats, cows, pigs, horses, goats, sheep, dogs and cats. The transgenic DNA may encode human STE20-related kinases. Native expression in an animal may be reduced by providing an amount of anti-sense RNA or DNA effective to reduce expression of the receptor.

IX. Gene Therapy

[0217] Protein kinases of the invention, or their genetic sequences will also be useful in gene therapy (reviewed in Miller, Nature 357:455-460, 1992). Miller states that advances have resulted in practical approaches to human gene therapy that have demonstrated positive initial results. The basic science of gene therapy is described in Mulligan (Science 260:926-931, 1993).

[0218] In one preferred embodiment, an expression vector containing protein kinase coding sequence is inserted into cells, the cells are grown in vitro, and then are infused in large numbers into patients. In another preferred embodiment, a DNA segment containing a promoter of choice (for example a strong promoter) is transferred into cells containing an endogenous gene encoding kinases of the invention in such a manner that the promoter segment enhances expression of the endogenous kinase gene (for example, the promoter segment is transferred to the cell such that it becomes directly linked to the endogenous kinase gene).

[0219] The gene therapy may involve the use of an adenovirus containing kinase cDNA targeted to a tumor, systemic kinase increase by implantation of engineered cells, injection with kinase-encoding virus, or injection of naked kinase DNA into appropriate tissues.

[0220] Target cell populations may be modified by introducing altered forms of one or more components of the protein complexes in order to modulate the activity of such complexes. For example, by reducing or inhibiting a complex component activity within target cells, an abnormal signal transduction event(s) leading to a condition may be decreased, inhibited, or reversed. Deletion or missense mutants of a component, that retain the ability to interact with other components of the protein complexes but cannot function in signal transduction may be used to inhibit an abnormal, deleterious signal transduction event.

[0221] Expression vectors derived from viruses such as retroviruses, vaccinia virus, adenovirus, adeno-associated virus, herpes viruses, several RNA viruses, or bovine papilloma virus, may be used for delivery of nucleotide sequences (e.g., cDNA) encoding recombinant kinase of the invention protein into the targeted cell population (e.g. tumor cells). Methods which are well known to those skilled in the art can be used to construct recombinant viral vectors containing coding sequences (Maniatis et al., Molecular Cloning: A Laboratory Manual, Cold Spring Harbor Laboratory, N.Y., 1989; Ausubel et al., Current Protocols in Molecular Biology, Greene Publishing Associates and Wiley Interscience, N.Y., 1989). Alternatively, recombinant nucleic acid molecules encoding protein sequences can be used as naked DNA or in a reconstituted system e.g., liposomes or other lipid systems for delivery to target cells (e.g., Feigner et al., Nature 337:387-8, 1989). Several other methods for the direct transfer of plasmid DNA into cells exist for use in human gene therapy and involve targeting the DNA to receptors on cells by complexing the plasmid DNA to proteins (Miller, supra).

[0222] In its simplest form, gene transfer can be performed by simply injecting minute amounts of DNA into the nucleus of a cell, through a process of microinjection (Capecchi, Cell 22:479-88, 1980). Once recombinant genes are introduced into a cell, they can be recognized by the cell's normal mechanisms for transcription and translation, and a gene product will be expressed. Other methods have also been attempted for introducing DNA into larger numbers of cells. These methods include: transfection, wherein DNA is precipitated with CaPO₄ and taken into cells by pinocytosis (Chen et al., Mol. Cell Biol. 7:2745-52, 1987); electroporation, wherein cells are exposed to large voltage pulses to introduce holes into the membrane (Chu et al., Nucleic Acids Res. 15:1311-26, 1987); lipofection/liposome fusion, wherein DNA is packaged into lipophilic vesicles which fuse with a target cell (Felgner et al., Proc. Natl. Acad. Sci. USA. 84:7413-7417, 1987); and particle bombardment using DNA bound to small projectiles (Yang et al., Proc. Natl. Acad. Sci. 87:9568-9572, 1990). Another method for introducing DNA into cells is to couple the DNA to chemically modified proteins.

[0223] It has also been shown that adenovirus proteins are capable of destabilizing endosomes and enhancing the uptake of DNA into cells. The admixture of adenovirus to solutions containing DNA complexes, or the binding of DNA to polylysine covalently attached to adenovirus using protein crosslinking agents substantially improves the uptake and expression of the recombinant gene (Curiel et al., Am. J. Respir. Cell. Mol. Biol., 6:247-52, 1992).

[0224] As used herein “gene transfer” means the process of introducing a foreign nucleic acid molecule into a cell. Gene transfer is commonly performed to enable the expression of a particular product encoded by the gene. The product may include a protein, polypeptide, anti-sense DNA or RNA, or enzymatically active RNA. Gene transfer can be performed in cultured cells or by direct administration into animals. Generally gene transfer involves the process of nucleic acid contact with a target cell by non-specific or receptor mediated interactions, uptake of nucleic acid into the cell through the membrane or by endocytosis, and release of nucleic acid into the cytoplasm from the plasma membrane or endosome. Expression may require, in addition, movement of the nucleic acid into the nucleus of the cell and binding to appropriate nuclear factors for transcription.

[0225] As used herein “gene therapy” is a form of gene transfer and is included within the definition of gene transfer as used herein and specifically refers to gene transfer to express a therapeutic product from a cell in vivo or in vitro. Gene transfer can be performed ex vivo on cells which are then transplanted into a patient, or can be performed by direct administration of the nucleic acid or nucleic acid-protein complex into the patient.

[0226] In another preferred embodiment, a vector having nucleic acid sequences encoding a protein Iinase polypeptide of the invention is provided in which the nucleic acid sequence is expressed only in specific tissue. Methods of achieving tissue-specific gene expression are set forth in International Publication No. WO 93/09236, filed Nov. 3, 1992 and published May 13, 1993.

[0227] In all of the preceding vectors set forth above, a further aspect of the invention is that the nucleic acid sequence contained in the vector may include additions, deletions or modifications to some or all of the sequence of the nucleic acid, as defined above.

[0228] In another preferred embodiment, a method of gene replacement is set forth. “Gene replacement” as used herein means supplying a nucleic acid sequence which is capable of being expressed in vivo in an animal and thereby providing or augmenting the function of an endogenous gene that is missing or defective in the animal.

X. Administration of Substances

[0229] Methods of determining the dosages of compounds to be administered to a patient and modes of administering compounds to an organism are disclosed in U.S. application Ser. No. 08/702,282, filed Aug. 23, 1996 and International patent publication number WO 96/22976, published Aug. 1, 1996, both of which are incorporated herein by reference in their entirety, including any drawings, figures, or tables. Those skilled in the art will appreciate that such descriptions are applicable to the present invention and can be easily adapted to it.

[0230] The proper dosage depends on various factors such as the type of disease being treated, the particular composition being used, and the size and physiological condition of the patient. Therapeutically effective doses for the compounds described herein can be estimated initially from cell culture and animal models. For example, a dose can be formulated in animal models to achieve a circulating concentration range that initially takes into account the IC₅₀ as determined in cell culture assays. The animal model data can be used to more accurately determine useful doses in humans.

[0231] Plasma half-life and biodistribution of the drug and metabolites in the plasma, tumors, and major organs can be also be determined to facilitate the selection of drugs most appropriate to inhibit a disorder. Such measurements can be carried out. For example, HPLC analysis can be performed on the plasma of animals treated with the drug and the location of radiolabeled compounds can be determined using detection methods such as X-ray, CAT scan, and MRI. Compounds that show potent inhibitory activity in the screening assays, but have poor pharmacokinetic characteristics, can be optimized by altering the chemical structure and retesting. In this regard, compounds displaying good pharmacokinetic characteristics can be used as a model.

[0232] Toxicity studies can also be carried out by measuring the blood cell composition. For example, toxicity studies can be carried out in a suitable animal model as follows: 1) the compound is administered to mice (an untreated control mouse should also be used); 2) blood samples are periodically obtained via the tail vein from one mouse in each treatment group; and 3) the samples are analyzed for red and white blood cell counts, blood cell composition, and the percent of lymphocytes versus polyrnorphonuclear cells. A comparison of results for each dosing regime with the controls indicates if toxicity is present.

[0233] At the termination of each toxicity study, further studies can be carried out by sacrificing the animals (preferably, in accordance with the American Veterinary Medical Association guidelines Report of the American Veterinary Medical Assoc. Panel on Euthanasia, Journal of American Veterinary Medical Assoc., 202:229-249, 1993). Representative animals from each treatment group can then be examined by gross necropsy for immediate evidence of metastasis, unusual illness, or toxicity. Gross abnormalities in tissue are noted, and tissues are examined histologically. Compounds causing a reduction in body weight or blood components are less preferred, as are compounds having an adverse effect on major organs. In general, the greater the adverse effect the less preferred the compound.

[0234] For the treatment of cancers the expected daily dose of a hydrophobic pharmaceutical agent is between 1 to 500 mg/day, preferably 1 to 250 mg/day, and most preferably 1 to 50 mg/day. Drugs can be delivered less frequently provided plasma levels of the active moiety are sufficient to maintain therapeutic effectiveness.

[0235] Plasma levels should reflect the potency of the drug. Generally, the more potent the compound the lower the plasma levels necessary to achieve efficacy.

### EXAMPLES

[0236] The examples below are not limiting and are merely representative of various aspects and features of the present invention. The examples below demonstrate the isolation and characterization of the protein kinases of the invention.

### Example 1

### Isolation of cDNA Clones Encoding Novel Mammalian Protein Kinases Materials and Methods Identification from cDNA Databases and Isolation of Clones Encoding Novel Protein Kinases

[0237] Novel kinases were identified from the public EST databases using a Hidden Markov model, abbreviated HMM (Krogh, A., Brown, M., Mian, I. S., Sjolander, K., and Haussler, D. 1994. Hidden Markov models in computational biology: Applications to protein modeling. J. Mol Biol., 235:1501-1531). The model was built with 70 mammalian and yeast kinase catalytic domain sequences. These sequences were chosen from a comprehensive collection of kinases such that no two sequences had more than 50% sequence identity. ESTs were tnanslated in six open reading frames and were searched against the model. ESTs that had a score of at least 10 against the HMM were then masked for repetitive sequences and vectors and were clustered using MSA. The resulting contigs were searched against known kinases to identify EST clones that encode novel kinases.

[0238] Approximately 40% of the ESTs encoding potentially novel kinases did not correspond to the correct EST upon sequence analysis. Most of these discrepancies were resolved by ordering additional clones, however, 14 remained unavailable. These 14 ESTs were amplified from a variety of single-stranded cDNA sources with primers derived from the corresponding EST entry as shown on Table 5. The PCR product was subcloned into a bluescript vector, digested to confirm the presence of a correct size insert and sequenced. Full sequencing of EST and PCR was carried out using a cycle sequencing Big-dye kit with AmpliTaq DNA Polymerase, FS (ABI, Foster City, Calif.). Sequencing reaction products were run on an ABI Prism 377 DNA Sequencer.

TABLE 5

Primers used to clone PCR products corresponding to novel
kinases

| | | | | | |
|---|---|---|---|---|---|
| | ID# | ID# | Parent | 5′ primer | 3′ primer |
| sp | na | aa | Sequence | Sequence* | Sequence* |

| | | | | | |
|---|---|---|---|---|---|
| H | 33 | 153 | 2R22-5-11 | GAGATCGRNTTYAARGA | TGTCACNCCNAGNSWCCAN |
| | | | | RTTYGA | AYRTT |
| M | 81 | 200 | 5R57_10_2_{—} | GCTGCTGGACAGTGACT | GAAAGCAAAGCCTTCACAC |
| | | | m TESK2_m | TGTATTT | CTT |
| H | 67 | 187 | SR69_17_2_h | CTCTCACCTCAGGAACT | GCTTGCGGATCTTCTCA |
| | | | | GG | |
| H | 46 | 166 | SGK309_h | GACATCCTGCCGGCCAA | CGGCCCTGGAGCTGCATCA |
| | | | | CTACG | CTA |
| M | 67 | 228 | 5R72_16_2_h | TGCGCGACACCATTGAC | CTCAGGGCTTACATACAGA |
| | | | | CAG | G |
| H | 45 | 165 | 5R72_8_2_h | AAAGGAGAACTACATTT | CTTCATCATCTCTAATACAT |
| | | | | TGAAAAT | TGGTTGG |
| H | 41 | 161 | Z36720 | CAAATTAAGATCATTGA | GGAAACAAAGTCCTTGGCC |
| | | | | CTTTGGG | TC |
| H | 115 | 234 | AL031652- | GTGGACATCTGGTCCCT | GTAGGTCCTTCACTCTTGG |
| | | | Pak6 | CG | AG |

*degenerate oligonucleatide residue designation:
N = A,C,G ot T
R = A or G
Y = C or T
S = C or G
W = A or T

Full-length Sequence Extension of Protein Kinases Using cDNA and Genomic Databases

[0239] Extension of partial cDNA sequences to encompass the full-length open-reading frame was carried out by iterative blastn searching of the cDNA databases listed in Table 6. All blastn searches were conducted using a blosum62 matrix, a penalty for a nucleotide mismatch of −3 and reward for a nucleotide match of 1. The gapped blast algortihm is described in: (Altschul, Stephen F., Thomas L. Madden, Alejandro A. Schaffer, Jinghui Zhang, Zheng Zhang, Webb Miller, and David J. Lipman (1997), “Gapped BLAST and PSI-BLAST: a new generation of protein database search programs”, Nucleic Acids Res. 25:3389-3402).

TABLE 6
Databases used for cDNA-based sequence extensions

| Database | Database Date |
|---|---|
| LifeGold templates | February 2000 |
| LifeGold compseqs | February 2000 |
| LifeGold compseqs | March 2000 |
| LifeGold compseqs | April 2000 |
| LifeGold fl | February 2000 |
| LifeGold flft | April 2000 |
| NCBI human Ests | May 2000 |
| NCBI murine Ests | May 2000 |
| NCBI nonredundant | May 2000 |

[0240] Extension of partial cDNA sequences to encompass the full-length open-reading frame was also carried out by iterative searches of genomic databases. Three methods were used. The first method made use of the Smith-Waterman algorithm to carry out protein-protein searches of the closest homologue or orthologue to the partial kinase. The target databases consisted of Genescan and open-reading frame (ORF) predictions of all human genomic sequence derived from the human genome project (HGP) as well as from Celera. The complete set of genomic databases searched is shown in Table 7 below. Genomic sequences encoding potential extensions were further assessed by blastp analysis against the NCBI nonredundant to confirm the novelty of the hit. The extending genomic sequences were incorporated into the cDNA sequence after removal of potential introns using the Seqman program from DNAStar. The default parameters used for Smith-Waterman searches were as shown next. Matrix: blosum 62; gap-opening penalty:12; gap extension penalty:2. Genescan predictions were made using the Genescan program as detailed in (Chris Burge and Sam Karlin “Prediction of Complete Gene Structures in Human Genomic DNA”, JMB (1997) 268(1):78-94). ORF predictions from genomic DNA were made using a standard 6-frame translation.

[0241] The second method for genomic sequence-based extensions made use of tBlastn searches of the homologue or orthologue to the partial kinase against the cDNA databases listed in Table 7. The recognition of significant hits in these databases made possible to identify bridging partial cDNA clones. The iterative application of the two methods made possible the assemblage of the virtual full-length sequence for a large number of the kinases presented in this application. All tblastn searches were conducted using a blosum62 matrix, a penalty for a nucleotide mismatch of −3 and reward for a nucleotide match of 1.

[0242] The last method for defining cDNA extensions from genomic sequence used iterative searches of genomic databases through the Genescan program to predict exon splicing and the Genewise program (http://www.sanger.ac.uk/SoftwarefWise2/) to predict potential ORFs based on homology to the closest orthologue/homologue. Table 7. Databases used for genomic-based sequence extensions

TABLE 7
Databases used for genomic-based sequence extensions

| Database | Number of entries | Database Date |
|---|---|---|
| Celera v. 1-5 | 5,306,158 | Jan 19/00 |
| Celera v. 6-10 | 4,209,980 | Mar 24/00 |
| Celera v. 11-14 | 7,222,425 | Apr 24/00 |
| Celera v. 15 | 243,044 | May 14/00 |
| HGP all Genescan | 25,885 | Apr 04/00 |
| HGP; Phase 0 | 4,944 | May 04/00 |
| HGP; Phase 1 | 28,478 | May 05/00 |
| HGP; Phase 2 | 1,508 | May 04/00 |
| HGP; Phase 3 | 9,971 | May 05/00 |

Virtual Extensions

[0243] Human AA826850 (SEQ ID NO: 3, SEQ ID NO:124)

[0244] Blastn analysis of the partial AA826850 sequence revealed an extension to encompass the complete ORF in the Incyte EST 238299.1. A frame-shift correction at position 595 of this EST (marked by X in NA sequence) generated an uninterrupted ORF.

[0245] Human AA960957 (SEQ ID NO: 4, SEQ ID NO:125)

[0246] Since the initial filing of this application, the partial AA960957 sequence appeared in the public database as the full-length gene for a protein kinase encoded by a gene that maps adjacent to the evc (AJ250839) (ellis-van creveld syndrome and weyers acrodental dysostosis) gene from 4p 16.1.

[0247] Human 5R79-46-1_h (SEQ ID NO:5, SEQ ID NO:126)

[0248] Blastn analysis of the partial 5R79-46-1 sequence revealed an extension to encompass the complete ORF in the Incyte EST 463894.6. Since the initial filing of this application, the full-length virtual 5R79-46-1 appeared in the public database as the full-length gene for the TANK-binding kinase (TBK1) (Pomerantz, J. L. and Baltimore, D. (1999) EMBO J. 18 (23), 6694-6704). TBK1 participates in NF-kB activation through the formation of a signaling complex with TRAF2 and TANK.

[0249] Human AA305176 (SEQ ID NO: 6, SEQ ID NO:127)

[0250] Blastn analysis of the partial AA305176 sequence revealed an extension to encompass the complete ORF in the Incyte EST 220937.1.

[0251] Human AA256100 (SEQ ID NO: 8, SEQ ID NO:129)

[0252] Blastn analysis of the partial AA256100 sequence revealed an extension to encompass the complete ORF through the assembly of three partial clones: Incyte EST 480815.6, KIAA0965 (BAA76809) and AA256100.

[0253] Human AA210825 (SEQ ID NO: 9, SEQ ID NO: 130)

[0254] Blastn analysis of the partial AA210825 sequence revealed an extension to encompass the nearly complete ORF through the assembly of three partial clones: Incyte EST 014721.7, and the NCBI EST's AW01158 and AA210825. An insertion of two “N's” at positions 1915 and 1916 generated an uninterrupted ORF. Blastx analysis indicated the possibility of a start Met in the range of 400-450 nucleotides (i.e. compared to the closest homolog, human PKCmu (CAA53384.1). However, no Met was found in this region; rather ORF ends in an in-frame stop preceeded by the sequence “[sequence omitted]”. It is possible that part of the sequence covered by nucleotide positions 1-400 derived from AW01158 comes from an intron, explaining the absence of a start Met.

[0255] Human AA127299 (SEQ ID NO:10, SEQ ID NO:131)

[0256] No entries in the database extended this sequence. The 1684 bp insert of this EST contains a 1369 bp intron at the 3′ end. Blastx and SW analysis of the 315 bp coding region revealed homology to the extracatalytic C2 domain of PKC. This EST, may or may not encode a kinase.

[0257] Human AA316804 (SEQ ID NO:11, SEQ ID NO:132)

[0258] Since the initial filing of this application, the partial AA316804 sequence appeared in the public database as the full-length gene for the PKC family protein kinase EPK2 or PKCnu (AB015982).

[0259] Human H19102 (SEQ ID NO:14, SEQ ID NO:135)

[0260] Genewise and Genescan analyses of the partial H19102 sequence revealed an extension from the HGP phase 3 contig 3810672 to encompass the complete catalytic domain of this EST. Blastn analysis against the non-redundant database revealed that this gene is found in the cosmid AC005726 from chromosome 17.H19102 may encode a dual catalytic kinase given the homology to S6 kinase. Analysis of genomic sequence upstream of the 5′ end of H19102 revealed a non-kinase gene oriented in the same polarity as H19102 suggestive of the start Met for H19102 being close to the 5′ end of the H19102 sequence. From this analysis it is deduced that the second catalytic domain of H19102, if present, is most likely located within the 47334-185,215 bp region of the genomic sequence of AC005726.

[0261] Human AA476563 (SEQ ID NO:15, SEQ ID NO:136) Since the initial filing of this application, the partial AA476563 sequence appeared in the public database as the full-length gene for the protein kinase RPS6KC1 (NM_{—}012424)(Zhang, H. et al Genomics (1999) 61, 314-318), which is an S6 kinase mapping to 12q12-q13.1.

[0262] Human AA626690 (SEQ ID NO:16, SEQ ID NO:137)

[0263] Since the initial filing of this application, the partial AA626690 sequence appeared in the public database as the full-length gene for the protein kinase RPS6KA6 (AF184965) (Yntema H. G et al (1999) Genomics 62, 332-343), an S6 kinase commonly deleted in patients with complex X-linked (Xq21.1) mental retardation.

[0264] Human AI215680 (SEQ ID NO: 17, SEQ ID NO:138)

[0265] Since the initial filing of this application, the partial AI215680 sequence appeared in the public database as the full-length gene encoding a hypothetical protein (AAD30182) from the locus AC006530.4 from chromosome 14.

[0266] Human AA887783 (SEQ ID NO:21, SEQ ID NO:142)

[0267] Blastn analysis of the partial AA887783 sequence revealed an extension to encompass the nearly complete ORF through the assembly of three partial clones: Incyte 415390R6 and the NCBI EST's AA887783 and N94726. Since the initial filing of this application, the nearly full-length virtual AA887783 sequence appeared in the public database as the fill-length gene encoding SGK3 (AF169035), a serum- and glucocorticoid-induced protein kinase (Kobayashi, T. et al (1999) Biochemical J. 344, 189-197.

[0268] Human R47805 (SEQ ID NO:22, SEQ ID NO:143)

[0269] A cDNA clone encoding the full-length ORF of R47805 was isolated using R47805 as a screening probe. A full-length form for R47805 has also appeared in the public database as

[0270] PTK9L (NM_{—}007284), an A6-related protein kinase.

[0271] Human H60215 (SEQ ID NO:23, SEQ ID NO:144)

[0272] Blastn analysis of the partial H60215 sequence revealed an extension to encompass the complete ORF in the public EST AI275726. This was confirmed through the full insert sequencing of this EST (2,310 bp) which corresponds to the sequence under SEQ ID NO:144.

[0273] A different stop codon was predicted for AI275726 compared to H60215 due to a single nucleotide insertion at position 1586 in AI1275726. Evidence for the extra nucleotide comes from EST AI191922.

[0274] SGK324_{n—}h orthologue of W30246_m (SEQ ID NO:24, SEQ ID NO:145)

[0275] Blastn, blastx and Smith-Waterman analyses of genomic databases revealed an extension to encompass the complete ORF corresponding to the human orthologue of murine W30246. Exons predicted from the following sequences were used for contig construction: Celera 17000189645083, 17000057549105 and 11000501939981; Incytel42404.1, HGP_{—}7249119, Incyte 7196489H1, Celera 11000501939981, 17000028165594; Incyte 7249119_{—}3, Celera 17000035772368, 11000502081575 and 17000140274329. The latter Celera sequence provides the N-terminus.

[0276] Human AA383293 (SEQ ID NO:26, SEQ ID NO:147)

[0277] Blastn, blastx and Smith-Waterman analyses of genomic databases revealed an extension to encompass the complete ORF corresponding for AA383293. Exons predicted from the following sequences were used for contig construction: (numbers in parenthesis refer to the aa sequence of the closest homolog (RU2S, NP_{—}057440) used for the Smith-Waterman query): N-term from Incyte 6010175_{—}2 (14-97), Incyte 6981981 (134-184) 7596749 (186-232) Celera 17000020789545 (243-301) CAB75619.1 (310-341)-(56-145 DCX homology) 6010175_{—}2, Celera 17000030058129 (241-262 DCX homology).

[0278] Human AA021445 (SEQ ID NO:32, SEQ ID NO:152)

[0279] Blastn analysis revealed an extension to encompass the nearly complete ORF corresponding for AA021445. Contig reconstruction was as follows: nucleotides 1-802 from KIAA0999 (AB023216); nucleotides 803-4321 from full-insert sequence of AA021445. A pairwise alignment between the AA021445 and KIAA0999 revealed three inserts in the extracatalytic C-terminus of 48, 48 and 161 aminoacids. In addition, both AA021445 and KIAA0999 have 15 copies of a CAG repeat. Trinucleotide repeats are often found in genes that linked to neurodegenerative diseases.

[0280] Human 2R22-55-1 (SEQ ID NO:33, SEQ ID NO:153)

[0281] Blastn analysis revealed an extension in the Incyte EST clone 321074.1 to encompass the complete ORF corresponding to 2R22-55-1.

[0282] Human orthologue of AA544838_m (SEQ ID NO:36, SEQ ID NO:156)

[0283] tBlastn analysis identified the partial human KIAA0135 (U79240) clone as the human orthologue of murine AA544838. Blastn revealed an extension KIAA0135_h (U79240) to encompass the complete ORF. The full ORF was reconstructed from Incyte406786.5, KFZp430051 and KIAA0135 (U79240).

[0284] Human orthologue of AI785735_m (SEQ ID NO:38, SEQ ID NO:158)

[0285] tBlastn analysis identified the partial human KIAA0781 (AB018324) clone as the human orthologue of murine AI785735. Blastn revealed an extension KIAA0135_h (U79240) to encompass the complete ORF. The full ORF was reconstructed from Incyte 986123.37 KIAA0781 (AB018324).

[0286] Human AA207220 (SEQ ID NO:39, SEQ ID NO:159)

[0287] Blastn analysis revealed an extension to encompass the nearly complete ORF corresponding for AA021445. The full ORF was reconstructed from Incyte 402740.1 and AA207220. Frame corrections: deletion of 441 and 595 over Inc402740.1 seq based on blastx to keep frame open; two n insertions 940, 941 over AA207220 to keep frame open.

[0288] Human AA426580 (SEQ ID NO:40, SEQ ID NO:160)

[0289] Since the initial filing of this application, the partial AA426580 sequence appeared in the public database as the full-length gene encoding MAK-V (AJ271722) from chromosome 21q22.1.

[0290] Human 5R79-54-1 (SEQ ID NO: 41, SEQ ID NO:161)

[0291] Genewise and Genescan analyses of the partial 5R79-54-1 sequence revealed an extension from genomic sequence to encode the full ORF for SR79-54-1.

[0292] Human orthologue of AA542015_m (SEQ ID NO: 42, SEQ ID NO:162)

[0293] tblastn analysis identified KIAA1297 (AB037718). Blastn extended the KIAA1297 sequence to provide the C-terminus through the Incyte 224074.1 EST. The partial ORF consists of a dual catalytic domain flanked by 6 Ig domains and 2 fibronectin repeats. Based on homology-to the bt drosophila protein (AAF59316.1), the human form of AA542015 is expected to be missing 16 Ig domains.

[0294] Human R19772 (SEQ ID NO:44, SEQ ID NO:164)

[0295] The full-length ORF for R19772 was isolated by screening a cDNA library using a probe derived from RI 9772. Since the initial filing of this application, the R19772 sequence appeared in the public database as the full-length gene encoding Trio (Duet) (AB011422). CDNA library screening revealed multiple isoforms for this gene which are summarized in the Table below.

TABLE 8
Isoforms for R19772

| | Kestrl | | | |
|---|---|---|---|---|
| Kestrl | AA | Isoform | | |
| Name | Acc # | type | Source | Description* |
| Trad | R19772 | B | Skeletal | Deletion of K at 124 |
| (Duet) | | | muscle | |
| | | | | Deletion of Q at 616 |
| | | | | Substitution of E for G at |
| | | | | 762 |
| | | C | Skeletal | Deletion of K at 124 |
| | | | muscle | |
| | | | | Deletion of Q at 616 |
| | | | | Substitution of E for G at |
| | | | | 762 |
| | | | | Deletion of 32 aa (160-191) |
| | | D | Lung tumor | Deletion of Q at 616 |
| | | | | Deletion of 32 aa (160-191) |
| | | E | Lung tumor | Deletion of Q at 616 |
| | | | | Deletion of 32 aa (160-191) |

*reference amino acid position are with respect to sequence of Trad (AB011422)

[0296] Human AA435956 (SEQ ID NO:48, SEQ ID NO:168)

[0297] Blastn analysis revealed an extension to encompass the nearly complete catalytic region of AA435956. 5′ end sequence extension was provided by genomic locus AC007242.3_h (range 44880-43801). Based on blastx analysis, the extended sequence encodes is full-length at the C-terminus.

[0298] Human AA397553 (SEQ ID NO: 51, SEQ ID NO:171)

[0299] Since the initial filing of this application, the partial AA397553 sequence appeared in the public database as the full-length gene encoding CRK7 (AF227198), a novel CDC2-related protein kinase that colocalizes with interchromatin granule clusters.

[0300] Human AA789239 (SEQ ID NO: 52, SEQ ID NO:172)

[0301] Since the initial filing of this application, the partial AA789239 sequence appeared in the public database as the full-length gene encoding NKIAMRE (AF130372), a novel kinase deleted in human leukemia

[0302] Human AA631990 (SEQ ID NO:55, SEQ ID NO:175)

[0303] Blastn analysis revealed an extension to encompass the full-length ORF for AA631990. The full ORF was reconstructed from 253847.5 and AA631990 and AA207220. Frame corrections: delete 1 C at 1380, delete 2N's at 2033/2034.

[0304] Human AA557536 (SEQ ID NO:56, SEQ HD NO:176)

[0305] Blastn analysis revealed an extension to encompass full-length ORF for AA557536. The full ORF was reconstructed from AA557536, celera 11000504061899 and the Incyte 097089.1 EST. An 85 bp intron was removed from AA557536.

[0306] Human N34132 (SEQ D) NO: 63, SEQ ID NO:183)

[0307] Full sequencing of EST N34132 (1.3 kb) confirmed that this cDNA encodes a novel NEK-subfamily kinase. Blast analysis against the EST database showed that four EST sequences (AA283140, AA283140, AA282911 and N53011) extended the sequence of N34132 at the 3′ end to form a 2.31 kb contig. Blast analysis of the new contig against the nonredunat public database showed that the N34132 extended contig overlapped (100% identity) over 228 bp at its 3′ end with human KIAA0344 (AB002342), a 5,787 bp cDNA encoding a 1246 aa polypeptide. The 5′790 bp of the KIAA0344 cDNA (encoding the 58 N-terminal protein sequence) were found to be divergent with respect to the extended 2.32 kb N34132 contig. Evidence that the extended N34132 contig (2.31 kb) and KIAA0344 (AB002342) belong to the same gene is the following. First, blast analysis of the nucleotide sequences for N34132 and KIAA0344 against the NRN database confirmed that these cDNA's are transcribed from the same genomic locus defined by two overlapping BACs (AC004765 and AC004803) from chromosome 12p 13.3. Second, full sequence determination of a PCR fragment amplified from single-stranded cDNA confirmed the junction between the extended N34132 contig and KIAA0344_h (AB002342). The 462 PCR product was amplified with primers CTCCTCAACAGACAGTGCAG (5′ primer) and GACATTCTACTACTCGGTCTC (3′ primer) designed from the N34132 extended contig and KIAA0344 sequences, respectively. The region of N34132 containing the start Met was isolated by PCR from a testis cDNA library (Clontech).

[0308] Human 5R69-17-2 (SEQ ID NO:67, SEQ ID NO:187)

[0309] The full-length ORF for 5R69-17-2 was isolated by screening a cDNA library using a probe derived from 5R69-17-2.

[0310] Human H85811 (SEQ ID NO:68, SEQ ID NO:188)

[0311] Tblastn, Smith-Waterman and blastn analyses using cDNA databases revealed an extension to encompass full-length ORF for H85811. The full ORF was reconstructed from Incyte ESTs 202971.8, 034583.3 and 034583.1 and public ESTs H85811 and AI570599.

[0312] Human R43524 (SEQ ID NO:73, SEQ ID NO:192)

[0313] Blastn analysis revealed an extension to encompass the complete catalytic region and the C-terminus of R43524. Since the initial Sling of this application, the partial R43524 sequence appeared in the public database as the full-length gene encoding the heme-regulated initiation factor 2-alpha kinase (HRI) (AF1 81071).

[0314] Human AA088547 (SEQ ID NO:78, SEQ ID NO:197)

[0315] Genewise and Genescan analyses of genornic databases revealed an extension to encompass the complete ORF for AA088547.

[0316] Human orthologue of AA139478_m (SEQ ID NO:80, SEQ ID NO:199) Tblastn identified the Incyte 211475.1 as the potential full-length human orthologue of murine AA139478

[0317] Human AA232253 (SEQ ID NO:82, SEQ ID NO:201)

[0318] The full-length ORF for AA232253 was isolated by screening a cDNA library using a probe derived from AA232253. Since the initial filing of this application, the AA232253 sequence appeared in the public database as the full-length gene encoding SLK (ABO11422). SLK is a stress-regulated mixed lineage kinase-like protein that activation of Rac and induction of apoptosis. cDNA library screening revealed multiple isoforms for this gene which are summarized in the Table below.

TABLE 9
Isoforms for AA232253

| Kestrl | Kestrl AA | Isoform | |
|---|---|---|---|
| Name | Acc # | type | Description* |
| MLK4 | AA232253 | MLK4 | Substitution of C for W at 346 |
| | | MLK4B | Different Cterm (332-800); seq in |
| | | | MLK4B is as shown in* |

*C-terminus specific to MLK4B

[0319] LPLAARMSEESYFESKTEESNSAEMSCQITATSNGEGHGMNPSLQAMMLMGFGDI
FSMNKAGAVMHSGMQINMQAKQNSS
KTTSKRRGKKVNMALGFSDFDLSEGDDDDDDDGEEEDNDMDNSE

[0320] Human H97685 (SEQ ID NO:84, SEQ ID NO:203)

[0321] Blastn analysis revealed an extension to encompass the full-length ORF for H97685. The full ORF was reconstructed from Incyte 474824.1 and the public ESTs H97685 and M62021.

[0322] Human AI052250 (SEQ ID NO:87, SEQ ID NO:206)

[0323] Blastn analysis revealed an extension to encompass the full-length ORF for AI052250. The fall ORF was reconstructed from Incyte 396868.1, the public partial cDNA FLJ10074 (minus intron) and the public ESTs and the public ESTs AI052250 and H97685, AI499220 and M62021.

[0324] Human AA278842 (SEQ ID NO:88, SEQ ID NO:206)

[0325] A nearly full-length cDNA (FL4F12) for AA278842 was isolated by screening a cDNA library using a probe derived from AA278842. A full-length virtual ORF was generated using FL4AF12 and AA278842.

[0326] Human AA599286 (SEQ ID NO:89, SEQ ID NO:208)

[0327] Since the initial filing of this application, the partial AA599286 sequence appeared in the public database as a full-length ORF (AK000342).

[0328] Human AA425725 (SEQ ID NO:90, SEQ ID NO:209)

[0329] Since the initial filing of this application, the partial AA425725 sequence appeared in the public database as MSSK1, a serine kinase gene located from human chromosome Xq28.

[0330] Human SGK022 orthologue of AA060026_m (SEQ ID NO:91, SEQ ID NO:210)

[0331] Tblastn, Smith-Waterman and blastn analyses of cDNA and genomic databases databases revealed a potential human orthologue for murine AA060026. The full-length ORF for SGK022 was reconstructed from genomic locus AC022307.

[0332] Human AA399669 (SEQ ID NO:93, SEQ ID NO:212)

[0333] Blastn analysis revealed an extension to encompass the full-length ORF for AA399669. The full ORF was reconstructed as follows: sequence 1-1007 from AL136295.2; sequence1008-2319 from AA399669 and Incyte 428177.1.

[0334] Human AA883975 (SEQ ID NO:95, SEQ ID NO:214)

[0335] Genescan and Genewise analyses of the genomic databases revealed an extension for AA883975 to encompass the full-length ORF

[0336] Human AA905446 (SEQ ID NO:96, SEQ ID NO:215)

[0337] Tblastn, Smith-Waterman and blastn analyses of cDNA and genomic databases databases revealed an extension for AA905446 to encompass the full-length ORF. For the Smith-Waterman analysis murine STK22 ( NP_{—}033462) was used as the closest orthologue. Contig formation: range 162133-163687 from HGP_h 6921333_{—}9; removed intron (146-893) predicted from blastx analysis.

[0338] Human H29974 (SEQ ID NO: 97 SEQ ID NO:216)

[0339] Blastn analysis revealed an extension to encompass a complete catalytic ORF for AA399669. The nearly full-length ORF was reconstructed using Incyte 213829.1 and H29974.

[0340] Human AA215311 (SEQ ID NO:99, SEQ ID NO:218)

[0341] Blastn analysis revealed an extension to encompass the full-length ORF for AA21531. The full ORF was reconstructed from Incyte 067584.1, 022456.1, AA215311 and the reverse complement of CPG_{—}043208.

[0342] Human AA018361 (SEQ ID NO:100, SEQ ID NO:219)

[0343] The full-length ORF for AA018361 was isolated by screening a cDNA library using a probe derived from AA018361. This yielded clone Sug4-30. Clone Sug4-30, like multiple, independent cDNA clones contained a 181 bp intron. The existence of intron-less RNA's was confirmed by a PCR reaction that generated a product that upon sequence analysis skipped the intron region. The full-length virtual ORF for AA018361 was generated through a contig between AL117482 (seq 1-367) and the sequence for clone Sug4-30.

[0344] Human orthologue of AA396601_m (SEQ ID NO:106, SEQ ID NO:225)

[0345] tBlastn and Smith-Waterman analyses of genomic sequence revealed an extension to encompass the full catalytic region for the human orthologue of AA396601. The ORF was reconstructed from Incyte 018653.9 (7261449H1, 6891740J1) and genomic sequence CPG_{—}040010.

[0346] Human orthologue of AA671275_m (SEQ ID NO:108, SEQ ID NO:227)

[0347] Since the initial filing of this application, a potential human orthologue for murine AA671275 appeared in the public database as the full-length ORF for vaccinia related kinase 3 (BAA90769).

[0348] Human H05721 (SEQ ID NO:111, SEQ ID NO:230)

[0349] Genescan and Genewise analyses of genomic sequence revealed an extension to encompass the full-length ORF for H05721.

[0350] Human AI086865 (SEQ ID NO:112, SEQ ID NO:231)

[0351] Genescan and Genewise analyses of genomic sequence revealed an extension to encompass the full-length ORF for AI086865. The full-length ORF was reconstructed from Celera 17000102901516, Incyte 243269.1 and public AL1377531.

[0352] Human AA836348 (SEQ ID NO:113, SEQ ID NO:232)

[0353] Genescan and Genewise analyses of genomic sequence revealed an extension to encompass the full-length ORF for AA836348.

[0354] Human R86668 (SEQ ID NO:14, SEQ ID NO:233)

[0355] The full-length ORF for R86668 was isolated by screening a cDNA library using a probe derived from R86668. Since the initial filing of this application, the R8668 sequence appeared in the public database as the full-length gene mitogen-activated protein kinase kinase kinase 6 (MAP3K6)(NM_{—}00467).

[0356] Human 2R41-9-4 (SEQ ID NO:16, SEQ ID NO:235)

[0357] The full-length virtual ORF for 2R41-9-4 was generated using genomic sequence to provide the Nterminus for the partial ORF predicted from clone 2R41-9-4

TABLE 10
Sequences deleted from the provisional patent due
to duplication with other genes in the patent

| Prov. SEQ ID NO: (na) | Prov. SEQ ID NO: (aa) |
|---|---|
| 160 | 196 |
| 213 | 214 |
| 215 | 216 |
| 122 | 126 |
| 119 | 123 |
| 148 | 184 |
| 4 | 20 |
| 7 | 23 |
| 205 | 206 |
| 14 | 30 |
| 15 | 31 |
| 35 | 56 |
| 42 | 63 |
| 51 | 72 |
| 44 | 65 |
| 77 | 91 |
| 78 | 92 |
| 79 | 93 |
| 80 | 94 |
| 157 | 193 |

Results

[0358] Table 1 documents the results from the analysis of the nucleic acid sequence data. From left to right the data presented is as follows. “Gene name” refers to the EST or PCR fragment that defined the novel kinase. “Species” refers to the organism the sequence was derived from. “ID#” refers to the nucleic acid and amino acid sequence ID number designation from this patent. “Kinase family” and “Kinase group” refers to the protein kinase classification defined by sequence homology and based on previously established phylogenetic analysis [Hardie, G. and Hanks S. The Protein Kinase Book, Academic Press (1995) and Hunter T. and Plowman, G. Trends in Biochemical Sciences (1977) 22:18-22 and Plowman G. D. et al. (1999) Proc. Natl. Acad. Sci. 96:13603-13610)]. “ORF Start”, “ORF End”, “ORF Length” refer to the open reading frame range and length as calculated by standard nucleic acid translation programs such as MapDraw (DNAStar). “DNA Repeats” refers to regions of low complexity sequence or repetitive elements such as Alu, LINE, SINE, and LTR sequences. The chromosomal location (CHR localization) for 37 of the 110 novel protein kinases is shown on Table 1 (NA, not available). The methods for determining chromosomal position are outlined below, in Example 2.

[0359] Table 2 documents the results from the analysis of the amino acid sequence data. From left to right the data presented is as follows. “Gene name” refers to the EST or PCR fragment that defined the novel kinase. “Species” refers to the organism the sequence was derived from. “ID#” refers to the nucleic acid and amino acid sequence ID number designation from this patent. “Kinase family” and “Kinase group” refers to the protein kinase classification defined by sequence homology and based on previously established phylogenetic analysis [Hardie, G. and Hanks S. The Protein Kinase Book, Academic Press (1995) and Hunter T. and Plowman, G. Trends in Biochemical Sciences (1977) 22:18-22 and Plowman G. D. et al. (1999) Proc. Natl. Acad. Sci. 96:13603-13610)]. “nraa Score”, “ID match aa”, “Identity”, “Similar”, “nraa Match Acc#”, Description” refer to the data obtained using a Smith-Waterman search of the amino acid sequence against the non-redundant protein database (Matrix: Pam100; gap open/extension penalties 14/1). “Kinase Domain Start”, “Kinase Domain End”, “Profile Start” and “Profile End” refer to data obtained using a Hidden-Markov Model to define catalytic range boundaries. The profile has a length of 261 amino acids, corresponding to the complete protein kinase catalytic domain Proteins in which the profile recognizes a full length catalytic domain have a “Profile Start” of 1 and a “Profile End” of 261. The boundaries of the catalytic domain within the overall protein are noted in the “Kinase Domain Start” and “Kinase Domain End” columns.

[0360] The following abbreviations were used for kinases:
[0361] ASK Apoptosis signal-regulating kinase
[0362] [symbol] K Ca2+/calmodulin-dependent protein kinase
[0363] [symbol] RK Cell cycle-related kinase
[0364] CDK Cyclin-dependent kinase
[0365] CK Casein kinase
[0366] DAPK Death-associated protein kinase
[0367] DM myotonic dystrophy kinase
[0368] Dyrk dual-specificity-tyrosine phosphorylating-regulated kinase
[0369] GAK Cyclin G-associated kinase
[0370] GRK G-protein coupled receptor
[0371] GuC Guanylate cyclase
[0372] HEPK Homeodomain-interacting protein
[0373] IRAK Interleukin-1 receptor-associated kin
[0374] MAPK Mitogen activated protein kinase
[0375] MAST Micotubule-associated STK
[0376] MLCK Myosin-light chain kinase
[0377] MLK Mixed lineage kinase
[0378] NIMA NimA-related protein kinase
[0379] PKA cAMP-dependent protein kinase
[0380] RSK Ribosomal protein S6 kinase
[0381] RTK Receptor tyrosine kinase
[0382] SGK Serum and glucocorticoid-regulated kinase
[0383] STK serine threonine kinase
[0384] ULK UNC-51-like kinase

[0385] The following abbreviations were used for species
[0386] H Human
[0387] M Murine
[0388] R Rat
[0389] FV Fowlpox virus
[0390] MT M. thermoautotrophicum
[0391] CE Caenorhabditis elegans
[0392] DM Drosophila melanogaster
[0393] OS Oryza sativa
[0394] SP Schizosaccharomyces pombe
[0395] TP Tetrahymena pyriformis
[0396] PI Petunia inflata
[0397] NC Neurospora crassa
[0398] MSV Medicago sativa
[0399] MSV Moloney murine sarcoma virus
[0400] SA Squalus acanthias
[0401] CS Cucumis sativus
[0402] GM Glycine max
[0403] LL Lilium longiflorum
[0404] TV Trichomonas vaginalis
[0405] MP Mycoplasma pneumoniae
[0406] DD Dictyostelium discoideum
[0407] SC Saccharomyces cerevisiae
[0408] MT Methanobacterium thermoautotrophicum
   Domain and Motif Identification

[0409] A Hidden Markov model (HMM) (Krogh, A., Brown, M., Mian, I. S., Sjolander, K, and Haussler, D. (1994). Hidden Markov models in computational biology: Applications to protein modeling. J. Mol. Biol., 235:1501-1531) was used to identify, both catalytic and extracatalytic domains. Table 4 shows extra-catalytic domains that were identified using the HMM program. Other domains such as coiled-coil and pest motifs were identified as described next.

[0410] Potential coiled-coil domains were identified using the COILS program (www.ch.embnet.org/software/COILS_form.html). The matrix used was MTIDK with windows of 14, 21, 28 amino acids. Only regions scoring 0.5 or higher were considered to have potential coiled-coil domain region.

[0411] Protein sequences containing potential pest motifs were identified using the program PESTfind (www.at.embnet.org/embnet/tools/bio/PESTfind/). PEST regions in proteins are by definition sequences that tend to be rich in proline, glutamic or aspartic acid, argininine and histidine; they have been associated with increased protein turnover rates (Rogers S. et al. (1986) Science 234, 364-368. The algorithm defines PEST sequences as hydrophilic stretches of amino acids greater than or equal to 12 residues in length. Such regions contain at least one P, one E or D and one S or T. They are flanked by lysine (K), arginine (R) or histidine (H) residues, but positively charged residues are disallowed within the PEST sequence. PESTfind produces a score ranging form about −50 to +50. By definition, a score above zero denotes a possible PEST region; a value greater than +5 defines a high probability that there is a PEST domain.

Identification of Potential Coiled-Coil Domains and PEST Domains in N34132

[0412] Potential coiled-coil domains were identified in N34132 (SEQ ID NO:183) using the COILS program. Only regions scoring 0.5 or higher were considered to have potential coiled-coil domain region. The amino acid positions within N34231 scoring for potential coil-coil regions are shown below.

TABLE 11
coiled-coil domains predicted for N34132

| Coiled-coil Region | Amino acid range | Length (aa) |
|---|---|---|
| 1 | 124-147 | 24 |
| 2 | 437-451 | 15 |
| 3 | 495-526 | 32 |
| 4 | 1,723-1,749 | 27 |

[0413] Potential PEST domains were identified in N34132 using PESTfind, a value greater than +5 defines a high probability that there is a PEST domain. The amino acid positions within N34132 scoring for potential PEST regions are shown below.

TABLE 12
Potential Pest domains identified in N34132

| PEST Region | Score | Amino acid range | Amino Acid Length |
|---|---|---|---|
| 1 | +4.91 | 54-95 | 42 |
| 2 | +11.4 | 537-570 | 34 |
| 3 | +31.08 | 1293-1304 | 12 |
| 4 | +10.15 | 1543-1565 | 23 |
| 5 | +6.17 | 1698-1732 | 35 |

### Example 2

### Chromosomal Localization of Novel Mammalian Protein Kinases Materials and Methods

[0414] Several sources were used to find information about the chromosomal localization of each of the genes described in this patent. First, the accession number for the nucleic acid sequence was used to query the Unigene database. The site containing the Unigene search engine is: http://www.ncbi.nlm.nih.gov/UniGene/Hs.Home.html. Information on map position within the Unigene database is imported from several sources, including the Online Mendelian Inheritance in Man (OMIM, http://www.ncbi.nlm.nih.gov/Omnim/searchomim.html), The Genome Database (http://gdb.infobiogen.fr/gdb/simpleSearch.html), and the Whitehead Institute human physical map (http://carbon.wi.mit.edu:8000/cgi-bin/contig/sts_info?database=release). For example, searching Unigene with W56561, an EST for a MAK-like kinase, the following information is retrieved: Chr.14, D14S65-qTEL. The location of this gene on an “ideogram” of the cytogenetic map of chromosome 14 is also provided, showing that W56561 maps to the bottom of chromosome 14, between 14q31 and 14qTel. If Unigene has not mapped the EST, then the nucleic acid for the gene of interest is used as a query against databases, such as dbsts and htgs (described at http://www.ncbi.nhn.nih.gov/BLAST/blast_databases.html) containing sequences that have been mapped already. The nucleic acid sequence is searched using BLAST-2 at NCBI (http://www.ncbi.nlm.nih.gov/cgi-bin/BLAST/nph-newblast) and is used to query either dbsts or htgs. In addition to the Whitehead and GDB sites mentioned above, Stanford University maintains a useful site for chromosomal mapping from STS data (http://www-shgc.stanford.edu/RH/rhserverformnew.html). Matches in htgs are often resolved immediately because the genomic region hit is annotated in the htgs entry. If an [symbol] match is found (defined roughly as 99% identity over a region of about 100 [symbol] pairs or longer, excluding any repetitive sequence), then the mapped position of the entry in the database is assigned to the original kinase query. Once a cytogenetic region has been identified by one of these approaches, disease association is established by searching OMIM (see above for URL) with the cytogenetic location. OMIM maintains a searchable catalog of cytogenetic map locations organized by disease. A thorough search of available literature for the cytogenetic region is alo made using Medline (http://www.ncbi.nlm.nih.gov/PubMed/medline.html). References for association of the mapped sites with chromosomal abnormalities found in human cancer can be found in: Knuutila, et al., Am J Pathol, 1998, 152:1107-1123.

Results

[0415] The chromosomal location for 37 of the 110 novel protein kinases is shown on Table 1. Three of the novel protein kinases were mapped to regions associated with cancer amplicons, as shown on this table. The regions were also cross-checked with the Mendelian Inheritance in Man database, which tracks genetic information for many human diseases, including cancer. References for association of the mapped sites with chromosomal abnormalities found in human cancer can be found in: Knuutila, et al., Am J Pathol, 1998, 152:1107-1123. Association of these mapped regions with other diseases is documented in the Online Mendelian Inheritance in Man (OMIM) (http://www.ncbi.nlm.nih.gov/htbin-post/Omim).

### Example 3

### Generation of Specific Immunoreagents

Materials and Methods

[0416] Peptide sequences to extra-catalytic regions of novel kinases are chosen which are not homologous to other known kinases based on a Smith Waterman homology search against the non-redundant protein database and predicted to be antigenic based on the DNAStar Protean program. These peptides are conjugated to KLH using Glutaraldehyde.

[0417] Rabbits are immunized with the KLH-peptide conjugates by four injections three weeks apart. The rabbits are bled ten and fourteen days following the third injection and bled out ten days after the fourth. The serum is checked against the peptide by ELISA.

TABLE 13

Peptides to be used as immununogens for raising
antibodies

| Clone | SEQ ID | | Amino |
|---|---|---|---|
| Name | NO (aa) | Peptide Sequence | Location |
| AA8256850 | 124 | KSRDNSRDSSQSEND | 339-353 |
| | | TEKLKRSQDLPREPLP | 372-386 |
| | | RGWRPYDIHS | 223-232 |
| 5R79-46-1 | 126 | FEGPRRNKEVMYK | 224-236 |
| | | KDDYNETVHKKTE | 451-463 |
| | | GTHPKDRNVEKLQ | 541-553 |
| | | EVSKYQEYTNELQET | 643-657 |
| AA256100 | 129 | IDDTSNFDDFPESDI | 405-419 |
| | | TEPDYKSKDWVFL | 427-439 |
| | | EEKKLRRSQHARKET | 61-75 |
| AA210825 | 130 | SNKDTLRKRHYWRLD | 507-521 |
| | | RHTTRKSSTTLRE | 488-500 |
| | | FQNNTTNRYYKEIPL | 528-542 |
| | | GKHRKTGRDVAVK | 668-680 |
| | | FPTKQESQLRNE | 687-698 |
| AA316804 | 132 | ESHVHQEPSKRIPS | 239-252 |
| | | HTKRKSSTMVKEGW | 409-422 |
| | | PSDLDVERDEEAVK | 375-388 |
| | | SPGQGKDHKDLSTSI | 543-557 |
| R47805 | 143 | EPVGRWDQDYDRAVL | 44-58 |
| | | KPKGPGGKRGHKRLI | 325-339 |
| | | PTDVAQLPSRVPRDA | 219-233 |
| AA234451 | 167 | DPFDWEKTGNDGSLT | 293-307 |
| | | HPRPQEKDVWEE | 374-385 |
| | | RENTDEVFPDEQLSD | 340-354 |
| | | RSEITQPDRDIPLVR | 427-441 |
| AA460132 | 180 | LKSYSTSSKKARPVL | 222-236 |
| | | KKLDEVRLRGRKRSM | 237-251 |
| | | ETEKTAQGLSNLAKT | 131-145 |
| N34132 | 183 | SGRRRRPTKSKGSKS | 1848-1862 |
| | | PGTAPSKPPLTKAPV | 1474-1488 |
| | | VDSDTQPKAPGIDD | 1365-1378 |
| | | AHSLDKTSHSSTTGL | 1253-1267 |
| 5R69-17-2 | 187 | GTTREKTDRVKST | 178-190 |
| | | HSEAPELHGKIRSSN | 138-152 |
| | | DETVTPPQFSIV | 87-98 |
| | | QYDVKSEIYS | 204-213 |
| AA278842 | 206 | TVDPEKSVRDQAFKA | 515-529 |
| | | DSSTADRWDDEDWGS | 637-651 |
| | | SVSEDPTQLEEVEKD | 539-553 |
| AA836348 | 232 | NAPTKRPRSSTVTEA | 323-337 |
| | | LDSEEDYYTPQKVDV | 514-528 |
| | | GDKASYRQPKHVEKL | 409-423 |

### Example 4

### Expression analysis of Novel Mammalian Protein Kinases

Gene Expression Analysis

Tissue Arrays

[0418] “cDNA libraries” derived from a variety of sources were immobilized onto nylon membranes and probed with 32P-labeled cDNA fragments derived from the gene(s) of interest.

[0419] Total RNA or mRNA was used as template in a reverse transcription reaction to generate single-stranded cDNAs (ss cDNA) that were tagged with specific sequences at each end. An oligo dT primer containing a specific sequence (CDS: AAGCAGTGGTAACAACGCAGAGTACT30VN (V=A,G,C N=A,G,C,T)) anneals at the polyA track at the 3′ end of the mRNA and the reverse transcriptase (MMLV RnaseH-) transcribes the antisense strand until it reaches the end of the RNA strand when it adds additional C residues. If a primer (SMII: AAGCAGTGGTAACAACGCAGAGTACGCGGG or ML2G: AAGTGGCAACAGAGATAACGCGTACGCGGG) ending with 3 Gs is added, it anneals to the added Cs and the MMLV recognizes the rest of the primer sequence as template and continues transcription. As a result, the synthesized cDNAs contain specific sequence tags at both the 5′ and the 3′ end. When the 5′ and the 3′ ends are tagged with the same sequence (CDS and SMII) it is referred to as “symmetric.” When the 5′ end is tagged with a different sequence than the 3′ end (CDS and ML2G) is referred to as “asymmetric” A double-stranded “cDNA library” is then generated by PCR amplification using the 3′PCR and ML2 primers (3′ PCR: AAGCAGTGGTAACAACGCAGAGT and ML2:AAGTGGCAACAGAGATAACGCGT) that anneal to the added sequence tags.

[0420] The amplified “cDNA libraries” were manually arrayed onto nylon membranes with a 384 pin replicator. The DNA was denatured by alkali treatment, neutralized and cross-inked by WV light. The arrays were pre-hybridized with Express Hyb (Clontech) and hybridized with 32P labeled probes generated by random hexamer priming of cDNA fragments corresponding to the genes of interest. After washing, the blots were exposed to phosphorimaging cassettes and the intensity of the signal was quantified. The amount of the DNA on the arrays was also quantified by treating non-denatured or denatured arrays with Syber Green I or Syber Green II respectively (1:100,000 in 50 mM Tris, pH8.0) for 2 minutes. After washing with 50 mM Tris, pH8.0, the fluorescent emission was detected with a phosphorimager (Molecular Dynamics) and quantified. The amount of the arrayed DNA was used to normalize the hybridization signal and the corrected values are tabulated in Table 3.

Results

[0421] The results of the microarray expression analysis of the protein kinases presented in this application is shown in Table 3. Data presentation from left to right is as follows: “Tissue”: tissue type of the cDNA; “Tumor sym”, indicates that the tissue is derived from a tumor, “sym” refers to the fact that the 5′ and 3′ primers used to make the sample are the same; “Normal Sym”, indicates normal tissue was used to make the sample, with symmetric primers as described above; “Tumor lo”, indicates that primary tumor tissue was used to make the cDNA; “Tumor cells”, indicates that these cDNA samples were made from cultured tumor cells; “Normal”, indicates that these samples are derived from normal tissue or cell lines; “Endos”, indicates that these samples are derived from endothelium-related tissue sources; “p53” refers to the status, mutant or wild-type, of the p53 gene in the source samples. Normalized expression values are presented for each gene referred to by its SEQ ID# on the subsequent columns. Genes represented in expression Table 3 are: SEQ ID NO:3 (AA826850), SEQ ID NO:5 (TBK1), SEQ ID NO:6 (AA305176), SEQ ID NO:8 (AA256100), SEQ ID NO:9 (CAB43292), SEQ ID NO:11 (EPK2), SEQ ID NO:12 (PKNbeta), SEQ ID NO:14 (H19102), SEQ ID NO:16 (RSK4), SEQ ID NO:17 (AAD30182), SEQ ID NO:20 (SGK2), SEQ ID NO:22 (PTK9L), SEQ ID NO:26 (AA383293), SEQ ID NO:29 (DRAK2), SEQ ID NO:31 (DRAK1), SEQ ID NO:032 (AA015726), SEQ ID NO:40 (MAK-V), SEQ ID NO:044 (TRAD), SEQ ID NO:044 (TRAD), SEQ ID NO:45 (AA454060), SEQ ID NO:47 (AA234451), SEQ ID NO:48 (AA436054), SEQ ID NO:49 (AA626859), SEQ ID NO:51 (KIAA0904), SEQ ID NO:52 (AA789239), SEQ ID NO:54 (CCRK), SEQ ID NO:55 (CLK4), SEQ ID NO:56 (AA557536), SEQ ID NO:57 (W56561), SEQ ID NO:60 (AA579641), SEQ ID NO:63 (NEK7), SEQ ID NO:66 (CAMKKB), SEQ ID NO:68 (HIPK2), SEQ ID NO:72 (R19609), SEQ ID NO:73 (HRI), SEQ ID NO:78 (AA088547), SEQ ID NO:79 (AA449542), SEQ ID NO:082a (MLK4), SEQ ID NO:82 (MLK4b), SEQ ID NO:84 (RIP4), SEQ ID NO:88 (AA278842), SEQ ID NO:89 (AA195964), SEQ ID NO:90 (MSSK1), SEQ ID NO:93 (TSK4), SEQ ID NO:94 (AI025291), SEQ ID NO:95 (AA948538), SEQ ID NO:96 (AA905446), SEQ ID NO:97 (H85389), SEQ ID NO:100 (AA018361), SEQ ID NO:101 (AA311714), SEQ ID NO:110 (AA452647), SEQ ID NO:111 (AA310219), SEQ ID NO:1 12 (AI086865), SEQ ID NO:114 (MEKK6), and SEQ ID NO:116 (SuRTK106).

### Example 5

### Kinase Assays for Erk, JNK1 and D38 MAP Kinases

[0422] 293T cells were transiently transfected with HA-p38 or co-transfected with Flag-tagged wt MIX4A, kinase-dead MIX4A, wild-type MLK4B or kinase-dead MLK4B using Lipofectarmine 2000 (Lifetech). Cells were lysed 36 hr post-transfection. Cell lysates normalized to contain equivalent amounts of HA-p38 were immunoprecipitated with anti-HA antibody (Mab HA-11, Babco). Immunoprecipitates were split in two portions, one portion was Western-blotted with anti-HA antibody and the other with a [symbol] o-specific p38 antibody (Promega) to detect activated levels of p38. Activation of [symbol] Jnk1 was measured similarly. (This example applies to AA232253 (SEQ ID NO:82, SEQ ID NO:201).)

Results:

[0423] In transient assays wild-type MLK4A and MLK4B (but not kinase-inactive MLK4A(K45M) or MLK4B(K45M)) activate Erk, JNK1 and p38 MAP kinases.

### Example 6

### RAC1 Guanine-Exchange Factor Assay

[0424] 293T cells were transiently transfected with HA-Rac1 or co-transfected with Flag-tagged Duet C, Duet E, Dbl and HA-Tiam-1. Cells were lysed 36 hour post-transfection. Cell lysates normalized to contain equivalent amounts of Rac1 were affinity precipitated with immobilized GST-PBD (p21-binding domain of Pak3). Bound proteins were Western blotted and probed with anti-HA antibody to detect levels of activated Rac1. ((This example applies to R199772 (Trad/Duet)(SEQ ID NO:44, SEQ ID NO:164).)

Results:

[0425] Duet C and Duet E both act as guanine nucleotide exchange factors on Rac1.

### CONCLUSION

[0426] One skilled in the art would readily appreciate that the present invention is well adapted to carry out the objects and obtain the ends and advantages mentioned, as well as those inherent therein. The molecular complexes and the methods, procedures, treatments, molecules, specific compounds described herein are presently representative of preferred embodiments are exemplary and are not intended as limitations on the scope of the invention. Changes therein and other uses will occur to those skilled in the art which are encompassed within the spirit of the invention are defined by the scope of the claims.

[0427] It will be readily apparent to one skilled in the art that varying substitutions and modifications may be made to the invention disclosed herein without departing from the scope and spirit of the invention.

[0428] All patents and publications mentioned in the specification are indicative of the levels of those skilled in the art to which the invention pertains.

[0429] The invention illustratively described herein suitably may be practiced in the absence of any element or elements, limitation or limitations which is not specifically disclosed herein. Thus, for example, in each instance herein any of the terms “comprising”, “consisting essentially of” and “consisting of” may be replaced with either of the other two terms. The terms and expressions which have been employed are used as terms of description and not of limitation, and there is no intention that in the use of such terms and expressions of excluding any equivalents of the features shown and described or portions thereof, but it is recognized that various modifications are possible within the scope of the invention claimed.

[0430] In particular, although some formulations described herein have been identified by the excipients added to the formulations, the invention is meant to also cover the final formulation formed by the combination of these excipients. Specifically, the invention includes formulations in which one to all of the added excipients undergo a reaction during formulation and are no longer present in the final formulation, or are present in modified forms.

[0431] In addition, where features or aspects of the invention are described in terms of Markush groups, those skilled in the art will recognize that the invention is also thereby described in terms of any individual member or subgroup of members of the Markush group. For example, if X is described as selected from the group consisting of bromine, chlorine, and iodine, claims for X being bromine and claims for X being bromine and chlorine are fully describe

[0432] Other embodiments are within the following claims.

TABLE 1

| Gene Name | 5P | Prov_Seq_ID_NA | Prov_Seq_ID_AA | Seq_ID_ [symbol] _na | Seq_ID_ [symbol] _aa | Family | Group |
|---|---|---|---|---|---|---|---|
| X69117_h_BARK2_h | H | x | x | 1 | 122 | AGC | GRK |
| AA144574_m BARK2_m | M | 1 | 17 | 2 | 123 | AGC | GRK |
| AA826550_h | H | 140 | 176 | 3 | 124 | AGC | Mo3C11.1_ca |
| AA950957_h | H | 11 | 27 | 4 | 125 | AGC | Mo3C11.1_ca |
| 5R79-45-1_h, TBK1_h | H | 207 | 206 | 5 | 126 | AGC | Mo3C11.1_ca |
| AA305176_h | H | 4, 2 | 18, 20 | 6 | 127 | AGC | NDR |
| AA116841_m | M | 4, 2 | 18, 20 | 7 | 128 | AGC | NDR |
| AA256100_h | H | 3 | 19 | 8 | 129 | AGC | NDR |
| AA210825_h | H | 5 | 21 | 9 | 130 | AGC | PKC |
| AA127299_h | H | 203 | 204 | 10 | 131 | AGC | PKC |
| AA316604_h, EPK2 | H | 6 | 22 | 11 | 132 | AGC | PKC |
| N42050_h PKNbeta | H | [symbol] | 24 | 12 | 133 | AGC | PKC |
| AI021023_m PKNbeta_m | M | x | [symbol] | 13 | 134 | AGC | PKC |
| H19102_h | H | 12 | 28 | 14 | 135 | AGC | S6K |
| AA476563_h RPS6KC1 | H | 9 | 25 | 15 | 136 | AGC | S6K |
| AA626690_h RSK4 | H | 10 | 26 | 16 | 137 | AGC | S6K |
| AA215680_h | H | 227 | 226 | 17 | 138 | AGC | S6K |
| SGK_h | H | x | x | 18 | 139 | AGC | SGK |
| AA107515_m | M | x | x | 19 | 140 | AGC | SGK |
| AA109506_m | M | 13 | 29 | 20 | 141 | AGC | SGK |
| AA557783_h SGK3, SGKL | H | 10 | 32 | 21 | 142 | AGC | SGK |
| R47805_h PTK9L | H | 131 | 167 | 22 | 143 | Atypical | A6 |
| H60215_h | H | 33 | 54 | 23 | 144 | CAMK | AMPK |
| SGK324_h | H | x | x | 24 | 145 | CAMK | CAMK |
| W30246_m SGK324_m | M | 36 | 57 | 25 | 146 | CAMK | CAMK |
| AA383293_h | H | 38 | 59 | 26 | 147 | CAMK | CAMK |
| AA197883_m | M | 34 | 55 | 28 | 148 | CAMK | CAMK |
| AA172300_h DRAK2 | H | 37 | 58 | 29 | 149 | CAMK | DAPK |
| W44150_m DRAK2_m | M | x | x | 30 | 150 | CAMK | DAPK |
| H01248_h, DRAK1_h | H | 40 | 61 | 31 | 151 | CAMK | DAPK |
| AA021445_h | H | 45 | 66 | 32 | 152 | CAMK | EMK |
| 2R22-5-11_h | H | 43 | 64 | 33 | 153 | CAMK | EMK |
| R31237_1_h, AAC33487 | H | x | x | 34 | 154 | CAMK | EMK |
| W90839_m | M | 49 | 70 | 35 | 155 | CAMK | EMK |
| 406785, 5_h | H | x | [symbol] | 36 | 156 | CAMK | EMK |
| AA544838_m 406786_m | M | 48 | 69 | 37 | 157 | CAMK | EMK |
| AA785735_h | H | x | [symbol] | 38 | 158 | CAMK | EMK |
| AA207220_h | H | 46 | 67 | 39 | 159 | CAMK | EMK |
| AA426580_h, MAK_V_h | H | 47 | 66 | 40 | 160 | CAMK | EMK |
| Z36720_h | H | 50 | 71 | 41 | 161 | CAMK | MLCK |
| SGK068_h | H | x | [symbol] | 42 | 162 | CAMK | Trio |
| AA542015_m SGK088_m | M | 39 | 80 | 43 | 163 | CAMK | Trio |
| R19772_h | H | 52 | 73 | 44 | 164 | CAMK | Trio |
| 5R72_8_2_h | H | 53 | 74 | 45 | 165 | CAMK | Unique |
| SGK309_h | H | 159 | 195 | 46 | 166 | CKI | CKI |
| AA234451_h | H | 75 | 75 | 47 | 167 | CKI | CKI |
| AA435956_h | H | 82 | 95 | 48 | 168 | CMGC | CDK |
| AA625859_h | H | 84 | 98 | 49 | 169 | CMGC | CDK |
| AA061797_m | M | x | [symbol] | 50 | 170 | CMGC | CDK |
| AA397553_h CRK7 | H | 61 | 95 | 51 | 171 | CMGC | CDK |
| AA769239_h | H | 85 | 99 | 52 | 172 | CMGC | CDK |
| AA124976_m | M | x | x | 53 | 173 | CMGC | CDK |
| AA575635_m CCRK_m | M | x | x | 54 | 174 | CMGC | CDK |
| AA631990_h CLK4 | H | 105 | 107 | 55 | 175 | CMGC | CLK |
| AA557536_h | H | 69 | 103 | 56 | 176 | CMGC | RCK |
| N28806_h, MOK | H | 90 | 104 | 57 | 177 | CMGC | RCK |
| AB023153_h, ICK | H | [symbol] | x | 58 | 178 | CMGC | RCK |
| AA839940_m | M | [symbol] | x | 59 | 179 | CMGC | RCK |
| AA460132_h | H | 165 | 201 | 60 | 180 | Microbial PK | YGR262_ [symbol] c |
| SGK034_h | H | [symbol] | x | 61 | 181 | Other | C26C2_ce |
| AA103218_m SGK034_m | M | 147 | 183 | 62 | 182 | Other | C26C2_ce |
| NEK7_h, N34132_h | H | 122 | 125 | 63 | 183 | Other | C26C2_ce |
| BCON3_h | H | x | x | 64 | 184 | Other | C26C2_ce |
| AA711629_m | M | 148 | 184 | 65 | 185 | Other | C26C2_ce |
| AA099102_h_CaMKKB | H | 132 | 168 | 66 | 186 | Other | CAMKK |
| 5R69_17_2_h | H | 158 | 194 | 67 | 187 | Other | CTR1 |
| H85811_h | H | 134 | 170 | 68 | 188 | Other | DYRK |
| AA02193_h DYRK3 | H | x | x | 69 | 189 | Other | DYRK |
| AA589241_m DYRK3_m | M | 133 | 169 | 70 | 190 | Other | DYRK |
| 5R72_16_2_h, R19927_h | H | 100 | 112 | 71 | 191 | Other | EIFK |
| R43524_h, HR1_h, R19609 | H | 111 | 114 | 73 | 192 | Other | EIFK |
| 17000057519457_h | H | x | x | 74 | 193 | Other | Endop |
| AA013524_m | M | 135 | 171 | 75 | 194 | Other | Endop |
| 17000139801197_h, IRAKM | H | x | x | 76 | 195 | Other | IRAK |
| AA840598_m IRAKM_m | M | 137 | 173 | 77 | 196 | Other | IRAK |
| AA088547_h | H | 138 | 174 | 78 | 197 | Other | IRE |
| HGP_5644468 | H | x | x | 79 | 198 | Other | KYK2_dd |
| AA449542_m | M | 139 | 175 | 80 | 199 | Other | KYK2_dd |
| 5R57_10_2_m TESK2_m | M | 115 | 116 | 81 | 200 | Other | LIMK |
| AA232253_h | H | 117 | 118 | 82 | 201 | Other | MLK |
| AI375137_h | H | 209 | 210 | 83 | 202 | Other | MLK |
| H97865_h | H | 143 | 179 | 84 | 203 | Other | RIP |
| W20810_m | M | 144 | 180 | 85 | 204 | Other | RIP |
| AA744236_h | H | 211 | 212 | 86 | 205 | Other | SCY1_sc |
| AI052250_h | H | 225 | 226 | 87 | 206 | Other | SCY1_sc |
| AA276842_h | H | 164 | 200 | 88 | 207 | Other | SCY1_sc |
| AA599288_h | H | 145 | 181 | 89 | 208 | Other | SLO87 |
| AA425725_h | H | 148 | 182 | 90 | 209 | Other | SRPK |
| SGK022_1_h | H | x | x | 91 | 210 | Other | STK22A |
| AA050025_m SGK022_m | M | 149 | 185 | 92 | 211 | Other | STK22A |
| AA399669_h | H | 150 | 186 | 93 | 212 | Other | STK22A |
| AA758539_h | H | 151 | 187 | 94 | 213 | Other | STK22A |
| AA853975_h | H | 153 | 189 | 95 | 214 | Other | TSK |
| AA905445_h | H | 222 | 224 | 96 | 215 | Other | TSK |
| H29974_h | H | 58 | 102 | 97 | 216 | Other | UNC |
| AA498104_m H29974_m | M | x | x | 98 | 217 | Other | UNC |
| AA215311_h | H | 155 | 191 | 99 | 218 | Other | UNC |
| AA018361_h | H | 154 | 190 | 100 | 219 | Other | UNC |
| AA311714_h | H | 156 | 192 | 101 | 220 | Other | UNC |
| SGK384_h | H | x | x | 102 | 221 | Other | Unique |
| AA210451_m SGK384_m | M | 106 | 108 | 103 | 222 | Other | Unique |
| SGK071_2_h | H | x | x | 104 | 223 | Other | Unique |
| AA115352_m SGK071_m | M | 161 | 197 | 105 | 224 | Other | Unique |
| O18653.9_h | H | 162 | 198 | 106 | 225 | Other | Unique |
| AA396601_m | M | x | x | 107 | 226 | Other | Unique |
| AA671275_h VRK3 | H | 153 | 199 | 108 | 227 | Other | VRK |
| S71575_m VRK3_m | M | x | x | 109 | 228 | Other | VRK |
| AA452647_h MPSK1 | H | 138 | 172 | 110 | 229 | Other | YPL238_sc |
| H05721_h | H | 100 | 202 | 111 | 230 | Other | YC09_ce |
| AI086865_h | H | 86 | 100 | 112 | 231 | STE | NEK |
| AA638348_h | H | 120 | 124 | 113 | 232 | STE | NEK |
| R86668_h, MKK8 | H | 121 | 125 | 114 | 233 | STE | STE11 |
| PAK6_h 5R95-20-11 | H | 219 | 220 | 115 | 234 | STE | STE20-02 |
| SuRTK108_h 2R41-9-4_h | H | 128, 127 | 129, 130 | 116 | 235 | TK | RTK-20 |
| AA096024_m | M | 128, 127 | 130 | 117 | 236 | TK | RTK-20 |
| SGK2alpha_h | H | x | x | 118 | 237 | AGC | SGK |
| H06950_h_CCRK | H | 67 | 101 | 120 | 238 | CMGC | CDK |
| NM_007170_h TESK2 | H | x | x | 121 | 239 | Other | LIMK |

| Gene Name | Length_NA | Length_AA | ORF_Start | ORF_end | ORF_Length | DNA Repeats | CHR localization |
|---|---|---|---|---|---|---|---|
| X69117_h_BARK2_h | 2067 | 658 | 1 | 2064 | 2064 | x | 22q11 |
| AA144574_m BARK2_m | 1365 | 378 | 2 | 1135 | 1134 | x | NA |
| AA826550_h | 1785 | 419 | 8 | 1264 | 1257 | 285-304 | NA |
| AA950957_h | 3224 | 414 | 55 | 1306 | 1242 | x | 4p16.1 |
| 5R79-45-1_h, TBK1_h | 3013 | 729 | 93 | 2279 | 2167 | x | NA |
| AA305176_h | 1421 | 329 | 53 | 1039 | [symbol] 67 | x | 10p11.2 |
| AA116841_m | 562 | 88 | 3 | 260 | 264 | x | NA |
| AA256100_h | 4983 | 454 | 56 | 1477 | 1392 | x | 12q11 |
| AA210825_h | 3263 | 978 | 117 | 3050 | 2934 | x | 19q13-q13.3 |
| AA127299_h | 315 | 105 | 1 | 315 | 315 | x | NA |
| AA316604_h, EPK2 | 2673 | 890 | 1 | 2670 | 2670 | x | 2p21 |
| N42050_h PKNbeta | 2670 | 889 | 1 | 2667 | 2667 | 2221-2280 | NA |
| AI021023_m PKNbeta_m | 929 | 205 | 2 | 615 | 815 | x | NA |
| H19102_h | 1155 | 384 | 1 | 1152 | 1152 | 599-635 | CHR17 |
| AA476563_h RPS6KC1 | 1410 | 459 | 1 | 1407 | 1407 | x | 12q12-q13.1 |
| AA626690_h RSK4 | 2238 | 745 | 1 | 2235 | 2235 | x | xq21.1 |
| AA215680_h | 1650 | 549 | 1 | 1547 | 1547 | 757-786 | 14q24.3 |
| SGK_h | 1296 | 431 | 1 | 1293 | 1293 | 856-883 | 5q21-q22 |
| AA107515_m | 2432 | 430 | 75 | 1364 | 1290 | 1804-1830 | NA |
| AA109506_m | 1346 | 244 | 2 | 733 | 732 | x | NA |
| AA557783_h SGK3, SGKL | 2250 | 445 | 36 | 1373 | 1338 | x | NA |
| R47805_h PTK9L | 1050 | 349 | 1 | 1047 | 1047 | x | 3p14.3 |
| H60215_h | 2310 | 440 | 420 | 1738 | 1320 | x | 1p31.1-1p32.3 |
| SGK324_h | 3240 | 692 | 7 | 2062 | 2076 | 208-227 | NA |
| W30246_m SGK324_m | 1248 | 297 | 1 | 891 | 591 | x | NA |
| AA383293_h | 2424 | 685 | 1 | 2058 | 2058 | 439-458 | NA |
| AA197883_m | 2421 | 805 | 1 | 2418 | 2418 | x | NA |
| AA172300_h DRAK2 | 1626 | 373 | 262 | 1380 | 1119 | x | 2q31-2q24.3 |
| W44150_m DRAK2_m | 2671 | 372 | 171 | 1285 | 1116 | x | NA |
| H01248_h, DRAK1_h | 1245 | 414 | 1 | 1242 | 1242 | 91-110 | 7p11-q11 |
| AA021445_h | 4321 | 1311 | 146 | 4078 | 3933 | x | 11q22.1-11q22.3 |
| 2R22-5-11_h | 2311 | 436 | 871 | 2178 | 1306 | 81-2251, 1256-12 | NA |
| R31237_1_h, AAC33487 | 2190 | 729 | 1 | 2157 | 2157 | x | NA |
| W90839_m | 1594 | 520 | 1 | 1580 | 1560 | x | NA |
| 406785, 5_h | 4139 | 1330 | 77 | 4085 | 3990 | x | 2q34-q37 |
| AA544838_m 406786_m | 1350 | 230 | 3 | 692 | [symbol] | 1002-1022 | NA |
| AA785735_h | 5183 | 926 | 155 | 2932 | 2776 | x | NA |
| AA207220_h | 2291 | 629 | 103 | 1959 | 1587 | x | NA |
| AA426580_h, MAK_V_h | 2145 | 714 | 1 | 2142 | 2142 | x | 21q11 |
| Z36720_h | 2625 | 874 | 1 | 2622 | 2622 | x | NA |
| SGK068_h | 7710 | 2285 | 1 | 5858 | 8858 | x | NA |
| AA542015_m SGK088_m | 1251 | 127 | 1 | 381 | 381 | x | NA |
| R19772_h | 3854 | 1287 | 1 | 3061 | 3861 | x | 3q13.3-q21 |
| 5R72_8_2_h | 2588 | 514 | 405 | 1947 | 1542 | x | 11p15.1-11p15.2 |
| SGK309_h | 1820 | 506 | 97 | 1620 | 1524 | 843-852 | NA |
| AA234451_h | 2452 | 478 | 405 | 1639 | 1434 | x | NA |
| AA435956_h | 1077 | 266 | 1 | 796 | 795 | x | NA |
| AA625859_h | 911 | 247 | 2 | 742 | 741 | 54-119 | NA |
| AA061797_m | 2615 | 296 | 2 | 689 | 885 | x | NA |
| AA397553_h CRK7 | 4473 | 1490 | 1 | 4470 | 4470 | 1210-1238 | NA |
| AA769239_h | 1 [symbol] | 534 | 6 | 1807 | 1802 | x | 5q23-q23.3 |
| AA124976_m | 1 [symbol] | 337 | 1 | 1011 | 1011 | x | NA |
| AA575635_m CCRK_m | 1380 | 211 | 1 | 633 | 633 | 163-191 | NA |
| AA631990_h CLK4 | 2488 | 499 | 34 | 1530 | 1497 | x | NA |
| AA557536_h | 1831 | 545 | 30 | 1664 | 1635 | 516-538 | NA |
| N28806_h, MOK | 1260 | 419 | 1 | 1257 | 1257 | x | 14q32 |
| AB023153_h, ICK | 1599 | 632 | 1 | 1896 | 1896 | x | NA |
| AA839940_m | 1776 | 413 | 1 | 1239 | 1239 | x | NA |
| AA460132_h | 1428 | 253 | 199 | 957 | 759 | x | 20q12 Amplicon |
| SGK034_h | 3304 | 462 | 1 | 1366 | 1386 | x | NA |
| AA103218_m SGK034_m | 2328 | 251 | 2 | 544 | 843 | x | NA |
| NEK7_h, N34132_h | 7328 | 1952 | 42 | 5897 | [symbol] | x | 12p13.33 |
| BCON3_h | 2164 | 538 | 113 | 1717 | 1608 | 246-267 | NA |
| AA711629_m | 1568 | 378 | 1 | 1134 | 1134 | x | NA |
| AA099102_h_CaMKKB | 1767 | 588 | 1 | 1764 | 1764 | 65-84 | 12q23-q14 |
| 5R69_17_2_h | 3387 | 241 | 1650 | 2572 | 723 | 499-521 | NA |
| H85811_h | 3993 | 1171 | 163 | 3695 | 3513 | 1326-1348 | CHR7 |
| AA02193_h DYRK3 | 2141 | 553 | 253 | 1911 | 1859 | x | NA |
| AA589241_m DYRK3_m | 741 | 168 | 3 | 500 | 504 | x | NA |
| 5R72_16_2_h, R19927_h | 5163 | 1849 | 20 | 4958 | 4947 | x | NA |
| R43524_h, HR1_h, R19609 | 1693 | 530 | 1 | 1890 | 1890 | x | 7p22-p22.3 |
| 17000057519457_h | 3055 | 253 | 219 | 977 | 759 | 2263-2365 | NA |
| AA013524_m | 928 | 218 | 1 | 648 | 648 | x | NA |
| 17000139801197_h, IRAKM | 1791 | 595 | 1 | 1788 | 1758 | x | NA |
| AA840598_m IRAKM_m | 2243 | 392 | 1 | 1175 | 1175 | x | NA |
| AA088547_h | 2759 | 922 | 1 | 2756 | 2766 | x | NA |
| HGP_5644468 | 1857 | 322 | 179 | 1144 | 906 | x | NA |
| AA449542_m | 1251 | 280 | 2 | 641 | 840 | 602-621 | NA |
| 5R57_10_2_m TESK2_140 | 41 | 2 | 124 | 123 | x | NA | m |
| AA232253_h | 2403 | 800 | 1 | 2400 | 2400 | x | NA |
| AI375137_h | 2508 | 835 | 1 | 2505 | 2505 | 2219-2238 | NA |
| H97865_h | 2384 | 834 | 161 | 2062 | 1002 | x | 1q31 |
| W20810_m | 1073 | 289 | 3 | 859 | 567 | x | NA |
| AA744236_h | 2067 | 685 | 1 | 2084 | 2064 | x | 1q23 |
| AI052250_h | 1739 | 505 | 174 | 1635 | 1515 | x | NA |
| AA276842_h | 2658 | 508 | 105 | 2528 | 2424 | 1764-1783 | 11q12-q13 Amplicon |
| AA599288_h | 1949 | 549 | 1 | 1949 | 1949 | x | NA |
| AA425725_h | 1602 | 533 | 1 | 1599 | 1599 | x | Xq28 |
| SGK022_1_h | 1038 | 268 | 154 | 987 | 804 | x | NA |
| AA050025_m SGK022_m | 1004 | 268 | 147 | 950 | 804 | x | NA |
| AA399669_h | 1537 | 292 | 372 | 1244 | 808 | x | 14p11-q11 |
| AA758539_h | 1322 | 358 | 101 | 1174 | 1074 | x | NA |
| AA853975_h | 822 | 273 | 1 | 819 | 819 | x | NA |
| AA905445_h | 1065 | 216 | 365 | 1012 | 645 | x | NA |
| H29974_h | 1638 | 333 | 2 | 1000 | 999 | x | NA |
| AA498104_m H29974_m | 1490 | 412 | 1 | 1238 | 1238 | 701-729 | NA |
| AA215311_h | 2011 | 341 | 199 | 1221 | 1023 | x | NA |
| AA018361_h | 2769 | 481 | 113 | 1555 | 1443 | x | 15q23 |
| AA311714_h | 1875 | 565 | 138 | 1833 | 1595 | x | NA |
| SGK384_h | 117 | 39 | 1 | 117 | 117 | x | NA |
| AA210451_m SGK384_m | 2721 | 349 | 222 | 1268 | 1047 | 2251-2288 | NA |
| SGK071_2_h | 2115 | 704 | 1 | 2112 | 2112 | 57-76, 318-337 | NA |
| AA115352_m SGK071_m | 1729 | 540 | 3 | 1522 | 1820 | x | NA |
| O18653.9_h | 2461 | 540 | 1 | 1620 | 1620 | 240-259 | NA |
| AA396601_m | 1886 | 385 | 3 | 1097 | 1095 | x | NA |
| AA671275_h VRK3 | 1425 | 474 | 1 | 1422 | 1422 | x | 19q13 |
| S71575_m VRK3_m | 1009 | 234 | 3 | 704 | 702 | 937-957 | NA |
| AA452647_h MPSK1 | 915 | 306 | 1 | 915 | 915 | x | 3cen-3q21 |
| H05721_h | 2638 | 581 | 95 | 1537 | 1743 | x | 1p32.3-31 Amplicon |
| AI086865_h | 2463 | 598 | 7 | 2100 | 2094 | x | NA |
| AA638348_h | 2511 | 838 | 1 | 2508 | 2508 | x | NA |
| R86668_h, MKK8 | 3036 | 1011 | 1 | 3033 | 3033 | x | 1p32.3-p31. [symbol] |
| PAK6_h 5R95-20-11 | 2180 | 719 | 1 | 2157 | 2157 | x | 20p12 |
| SuRTK108_h 2R41-9-4_h | 2480 | 495 | 1 | 1485 | 1485 | x | 12p12.3 |
| AA096024_m | 1793 | 153 | 1 | 549 | 549 | 1352-1362 | NA |
| SGK2alpha_h | 1812 | 387 | 88 | 1185 | 1101 | x | NA |
| H06950_h_CCRK | 1359 | 452 | 1 | 1358 | 1358 | x | 9q21.1-q21.3 |
| NM_007170_h TESK2 | 3016 | 555 | 396 | 2060 | 1585 | x | NA |

[0433] TABLE 2

| | Patent | Patent | | | | | ID | | | nraa |
|---|---|---|---|---|---|---|---|---|---|---|
| | Seq | Seq | | | nraa | Length | match | % | % | Match |
| SP | ID# na | ID# aa | Family | Group | Pscore | aa | aa | Identity | Similar | ACC# |
| H | 1 | 122 | AGC | GRK | 2.7e−314 | 688 | 687 | 100 | 100 | CAB45857.1 |
| M | 2 | 123 | AGC | GRK | 1.30E−190 | 378 | 371 | 98 | 99 | NP_037029.1 |
| H | 3 | 124 | AGC | o3C11.1_ce | 5.80E−106 | 419 | 262 | 71 | 86 | CAB76471.1 |
| H | 4 | 125 | AGC | o3C11.1_ce | 1.40E−137 | 414 | 414 | 100 | 100 | CAB76471.1 |
| H | 5 | 126 | AGC | o3C11.1_ce | 0 | 729 | 729 | 100 | 100 | \|NP_037386.1 |
| H | 6 | 127 | AGC | NDR | 1.20E−09 | 329 | 73 | 46 | 66 | BAA76817.1 |
| M | 7 | 128 | AGC | NDR | 1.30E−19 | 88 | 42 | 49 | 71 | AAF55594.1 |
| H | 8 | 129 | AGC | NDR | 6.10E−181 | 464 | 463 | 100 | 100 | BAA76809.1 |
| H | 9 | 130 | AGC | PKC | 8.60E−160 | 978 | 615 | 67 | 80 | NP_002733.1 |
| H | 10 | 131 | AGC | PKC | 1.10E−10 | 105 | 42 | 42 | 57 | P05127 |
| H | 11 | 132 | AGC | PKC | 0 | 890 | 590 | 100 | 100 | NP_005804.1 |
| H | 12 | 133 | AGC | PKC | 9.4e−319 | 589 | 589 | 100 | 100 | NP_037487.1 |
| M | 13 | 134 | AGC | PKC | 1.20E−106 | 205 | 204 | 100 | 100 | JC7083 |
| H | 14 | 135 | AGC | S6K | 3.60E−12 | 384 | 94 | 38 | 55 | AAC62495.1 |
| H | 15 | 136 | AGC | S6K | 2.90E−257 | 469 | 469 | 100 | 100 | NP_036556.1 |
| H | 16 | 137 | AGC | S6K | 7.00E−176 | 745 | 745 | 100 | 100 | NP_055311.1 |
| H | 17 | 138 | AGC | S6K | 9.60E−222 | 549 | 649 | 100 | 100 | AAD30182.1 |
| H | 18 | 139 | AGC | SGK | 9.20E−103 | 431 | 430 | 100 | 100 | AAD41091.1 |
| M | 19 | 140 | AGC | SGK | 2.90E−157 | 430 | 426 | 99 | 99 | NP_035491.1 |
| M | 20 | 141 | AGC | SGK | 2.00E−76 | 244 | 244 | 100 | 100 | AAF12757.2 |
| H | 21 | 142 | AGC | SGK | 4.10E−211 | 446 | 375 | 88 | 88 | AAF27051.1 |
| H | 22 | 143 | Atypical | A6 | 5.60E−216 | 349 | 349 | 100 | 100 | NP_009215.1 |
| H | 23 | 144 | CAMK | AMPK | 1.40E−19 | 440 | 68 | 39 | 61 | CAA04119.1 |
| H | 24 | 145 | CAMK | CAMK | 1.50E−165 | 699 | 466 | 65 | 77 | O15075 |
| M | 25 | 146 | CAMK | CAMK | 1.60E−62 | 297 | 199 | 67 | 83 | AAF26675.1 |
| H | 26 | 147 | CAMK | CAMK | 2.60E−48 | 708 | 181 | 44 | 60 | O15075 |
| M | 28 | 148 | CAMK | CAMK | 2.60E−31 | 806 | 147 | 55 | 73 | AAF26675.1 |
| H | 29 | 149 | CAMK | DAPK | 3.10E−121 | 372 | 372 | 100 | 100 | NP_004217.1 |
| M | 30 | 150 | CAMK | DAPK | 7.90E−93 | 372 | 340 | 91 | 95 | NP_004217.1 |
| H | 31 | 151 | CAMK | DAPK | 1.20E−113 | 414 | 414 | 100 | 100 | NP_004751.1 |
| H | 32 | 152 | CAMK | EMK | 5.90E−165 | 1311 | 1053 | 80 | 80 | BAA76843.1 |
| H | 33 | 153 | CAMK | EMK | 1.20E−45 | 436 | 153 | 51 | 70 | T22427 |
| H | 33 | 153 | CAMK | EMK | 1.40E−32 | 436 | 122 | 46 | 65 | AAC15093.1 |
| H | 34 | 154 | CAMK | EMK | 1.30E−184 | 729 | 729 | 100 | 100 | AAC15093.1 |
| M | 35 | 155 | CAMK | EMK | 3.50E−126 | 462 | 462 | 100 | 100 | AAC33487.1 |
| H | 36 | 156 | CAMK | EMK | 0 | 1330 | 1235 | 100 | 100 | BAA09484.1 |
| M | 37 | 157 | CAMK | EMK | 5.10E−59 | 230 | 183 | 79 | 85 | BAA09484.1 |
| H | 38 | 158 | CAMK | EMK | 3.00E−111 | 926 | 636 | 100 | 100 | BAA34501.1 |
| H | 39 | 159 | CAMK | EMK | 7.30E−80 | 629 | 367 | 57 | 69 | NP_055655.1 |
| H | 40 | 160 | CAMK | EMK | 1.40E−244 | 714 | 714 | 100 | 100 | NP_055401.1 |
| H | 41 | 161 | CAMK | MLCK | 8.20E−76 | 874 | 211 | 63 | 80 | AAA73168.1 |
| H | 42 | 162 | CAMK | Trio | 0 | 2286 | 2227 | 100 | 100 | BAA92535.1 |
| M | 43 | 163 | CAMK | Trio | 7.60E−37 | 127 | 67 | 99 | 99 | BAA92535.1 |
| H | 44 | 164 | CAMK | Trio | 0 | 1287 | 1264 | 100 | 100 | NP_008995.1 |
| H | 45 | 165 | CAMK | Unique | 5.00E−20 | 514 | 114 | 41 | 63 | P25323 |
| H | 46 | 166 | CKI | CKI | 3.30E−89 | 508 | 181 | 53 | 65 | AAF59340.1 |
| H | 47 | 167 | CKI | CKI | 8.60E−98 | 478 | 188 | 57 | 68 | AAF59340.1 |
| H | 48 | 168 | CMGC | CDK | 9.60E−39 | 266 | 138 | 62 | 79 | NP_036527.1 |
| H | 49 | 169 | CMGC | CDK | 7.10E−48 | 247 | 146 | 59 | 75 | NP_004187.1 |
| M | 50 | 170 | CMGC | CDK | 2.90E−64 | 296 | 193 | 65 | 78 | NP_004187.1 |
| H | 51 | 171 | CMGC | CDK | 1.10E−264 | 1490 | 1490 | 100 | 100 | AAF36401.1 |
| H | 52 | 172 | CMGC | CDK | 9.20E−101 | 534 | 377 | 82 | 82 | AAF36509.1 |
| M | 53 | 173 | CMGC | CDK | 1.40E−128 | 337 | 225 | 92 | 96 | AAF34871.1 |
| M | 54 | 174 | CMGC | CDK | 3.00E−68 | 211 | 159 | 79 | 84 | NP_036261.1 |
| H | 55 | 175 | CMGC | CLK | 1.50E−242 | 499 | 436 | 91 | 93 | NP_031740.1 |
| H | 56 | 176 | CMGC | RCK | 9.10E−89 | 544 | 343 | 57 | 64 | AAD12719.1 |
| H | 57 | 177 | CMGC | RCK | 2.30E−189 | 419 | 419 | 100 | 100 | NP_055041.1 |
| H | 58 | 178 | CMGC | RCK | 1.50E−180 | 632 | 632 | 100 | 100 | AAF37278.1 |
| M | 59 | 179 | CMGC | RCK | 1.60E−79 | 413 | 198 | 60 | 77 | P20689 |
| H | 60 | 180 | Microbial PK | YGR262_sc | 2.50E−45 | 253 | 102 | 46 | 67 | AAF50799.1 |
| H | 61 | 181 | Other | C26C2_ce | 2.30E−158 | 509 | 258 | 100 | 100 | CAB70864.1 |
| M | 62 | 182 | Other | C26C2_ce | 1.80E−152 | 281 | 243 | 94 | 98 | CAB70864.1 |
| H | 63 | 183 | Other | C26C2_ce | 8.70E−300 | 1952 | 1193 | 99 | 99 | NP_055638.1 |
| H | 64 | 184 | Other | C26C2_ce | 1.10E−254 | 535 | 535 | 100 | 100 | NP_037524.1 |
| M | 65 | 185 | Other | C26C2_ce | 2.50E−208 | 378 | 372 | 98 | 100 | NP_037624.1 |
| H | 66 | 186 | Other | CAMKK | 3.80E−148 | 588 | 588 | 100 | 100 | AAD31507.1 |
| H | 67 | 187 | Other | CTR1 | 9.90E−24 | 287 | 87 | 33 | 52 | JQ1743 |
| H | 68 | 188 | Other | DYRK | 0 | 1171 | 1137 | 97 | 99 | AAD52566.1 |
| H | 69 | 189 | Other | DYRK | 2.10E−280 | 553 | 553 | 100 | 100 | NP_003573.1 |
| M | 70 | 190 | Other | DYRK | 2.30E−95 | 168 | 149 | 90 | 96 | NP_003573.1 |
| H | 71 | 191 | Other | EIFK | 0 | 1649 | 1493 | 90 | 98 | NP_038747.1 |
| H | 73 | 192 | Other | EIFK | 1.50E−220 | 630 | 630 | 100 | 100 | NP_055228.1 |
| H | 74 | 193 | Other | Endop | 2.50E−45 | 253 | 102 | 46 | 67 | AAF50799.1 |
| M | 75 | 194 | Other | Endop | 3.70E−45 | 216 | 100 | 45 | 64 | AAF50799.1 |
| H | 76 | 195 | Other | IRAK | 0 | 596 | 596 | 100 | 100 | NP_009130.1 |
| M | 77 | 196 | Other | IRAK | 1.20E−170 | 392 | 293 | 75 | 85 | NP_009130.1 |
| H | 78 | 197 | Other | IRE | 1.5e−323 | 922 | 746 | 82 | 69 | NP_036146.1 |
| H | 79 | 198 | Other | KYK2_dd | 8.70E−40 | 225 | 102 | 45 | 62 | AAF48758.1 |
| M | 80 | 199 | Other | KYK2_dd | 5.90E−32 | 280 | 109 | 32 | 50 | AAF48758.1 |
| M | 81 | 200 | Other | LIMK | 2.60E−17 | 41 | 37 | 92 | 95 | NP_009101.1 |
| H | 82 | 201 | Other | MLK | 2.50E−282 | 800 | 799 | 100 | 100 | AAF63490.1 |
| H | 83 | 202 | Other | MLK | 8.60E−251 | 835 | 835 | 100 | 100 | AAD29832.1 |
| H | 84 | 203 | Other | RIP | 2.20E−158 | 634 | 365 | 100 | 100 | BAA32317.1 |
| M | 85 | 204 | Other | RIP | 5.30E−158 | 289 | 288 | 100 | 100 | AAF03133.1 |
| H | 86 | 205 | Other | SCY1_sc | 0 | 688 | 688 | 100 | 100 | CAB55300.1 |
| H | 87 | 206 | Other | SCY1_sc | 1.70E−209 | 505 | 354 | 98 | 98 | BAA92598.1 |
| H | 88 | 207 | Other | SCY1_sc | 2.20E−157 | 808 | 396 | 45 | 61 | AAF56933.1 |
| H | 89 | 208 | Other | SLOB? | 7.40E−196 | 649 | 649 | 100 | 100 | BAA91097.1 |
| H | 90 | 209 | Other | SRPK | 5.80E−252 | 533 | 533 | 100 | 100 | NP_0.55185.1 |
| H | 91 | 210 | Other | STK22A | 3.80E−53 | 268 | 122 | 46 | 70 | NP_033461.1 |
| M | 92 | 211 | Other | STK22 | 2.70E−52 | 268 | 127 | 48 | 68 | NP_033462.1 |
| H | 93 | 212 | Other | STK22A | 4.60E−16 | 292 | 112 | 45 | 64 | NP_033461.1 |
| H | 94 | 213 | Other | STK22A | 5.10E−123 | 358 | 322 | 90 | 96 | NP_033462.1 |
| H | 95 | 214 | Other | TSK | 2.10E−33 | 273 | 122 | 46 | 62 | NP_033461.1 |
| H | 96 | 215 | Other | TSK | 2.50E−32 | 216 | 93 | 41 | 58 | NP_033462.1 |
| H | 97 | 216 | Other | UNC | 0.000062 | 333 | 57 | 36 | 56 | AAD32767.1 |
| M | 98 | 217 | Other | UNC | 0.002492 | 412 | 53 | 37 | 52 | BAA77341.1 |
| H | 99 | 218 | Other | UNC | 0.001096 | 341 | 50 | 36 | 56 | BAA77341.1 |
| H | 100 | 219 | Other | UNC | 1.90E−68 | 480 | 247 | 100 | 100 | T17265 |
| H | 101 | 220 | Other | UNC | 1.60E−208 | 585 | 468 | 96 | 96 | BAA91270.1 |
| H | 102 | 221 | Other | Unique | 6.70E−10 | 39 | 27 | 69 | 90 | AAD00575.1 |
| M | 103 | 222 | Other | Unique | 0.000022 | 349 | 38 | 30 | 50 | CAA18116.1 |
| H | 104 | 223 | Other | Unique | 0.000126 | 704 | 54 | 30 | 45 | BAA86576.1 |
| M | 105 | 224 | Other | Unique | 0.007365 | 540 | 25 | 42 | 61 | AAF47916.1 |
| H | 106 | 225 | Other | Unique | 0.31334 | 540 | 52 | 30 | 42 | P10162 |
| M | 107 | 226 | Other | Unique | 0.022948 | 365 | 25 | 34 | 57 | NP_006276.1 |
| H | 108 | 227 | Other | VRK | 3.10E−263 | 474 | 474 | 100 | 100 | BAA90769.1 |
| M | 109 | 228 | Other | VRK | 1.20E−111 | 234 | 191 | 82 | 90 | BAA90769.1 |
| H | 110 | 229 | Other | YPL236_sc | 7.40E−144 | 305 | 304 | 100 | 100 | AAC28337.1 |
| H | 111 | 230 | Other | YQ09_ce | 6.10E−49 | 561 | 135 | 43 | 63 | AAF46188.1 |
| H | 112 | 231 | STE | NEK | 3.30E−30 | 698 | 122 | 48 | 67 | P51954 |
| H | 113 | 232 | STE | NEK | 2.70E−119 | 836 | 357 | 86 | 86 | AAD31939.1 |
| H | 114 | 233 | STE | STE11 | 1.10E−291 | 1011 | 1011 | 100 | 100 | NP_004663.1 |
| H | 115 | 234 | STE | STE20-02 | 7.70E−177 | 719 | 719 | 100 | 100 | BAA94194.1 |
| H | 116 | 235 | TK | RTK-20 | 4.90E−24 | 495 | 77 | 36 | 56 | AAA98465.1 |
| M | 117 | 236 | TK | RTK-20 | 5.30E−18 | 183 | 53 | 39 | 57 | NP_032036.1 |
| H | 118 | 237 | AGC | SGK | 6.30E−112 | 367 | 367 | 100 | 100 | AAF12757.2 |
| H | 120 | 238 | CMGC | CDK | 2.80E−137 | 452 | 452 | 100 | 100 | NP_036251.1 |
| H | 121 | 239 | Other | LIMK | 6.50E−233 | 555 | 555 | 100 | 100 | NP_009101.1 |

| | | Kinase | Kinase | | |
|---|---|---|---|---|---|
| | | Domain(s) | Domain (s) | Profile | Profile |
| SP | Description | start | end | start | end |
| H | BARK2 [Homo sapiens] | 191 | 453 | 1 | 261 |
| M | Adrenergic receptor kinase, beta 2 (G-protein-linked receptor kk [symbol] | 3 | 143 | 121 | 261 |
| H | Serine/threonine protein kinase [Homo sapiens] | 26 | 286 | 1 | 261 |
| H | Serine/threonine protein kinase [Homo sapiens] | 23 | 283 | 1 | 261 |
| H | TANK-binding kinase 1 [Homo sapiens] | 9 | 304 | 1 | 261 |
| H | KIAA0973 protein [Homo sapiens] | 35 | 310 | 1 | 261 |
| M | CG7719 gene product [Drosophila melanogaster] | 24 | 44 | 242 | 261 |
| H | KIAA0965 protein [Homo sapiens] | 90 | 383 | 1 | 261 |
| H | Protein kinase C, mu [Homo sapiens] | 651 | 907 | 1 | 261 |
| H | Protein kinase C, BETA-II TYPE (PKC-BETA-2) [Homo sapiens] | 19 | 24 | 256 | 261 |
| H | Protein kinase C, nu [Homo sapiens] | 576 | 832 | 1 | 261 |
| H | PKNbeta [Homo sapiens] | 559 | 816 | 1 | 261 |
| M | Protein kinase N beta [Homo sapiens] | 1 | 134 | 126 | 261 |
| H | Ribosomal protein S6 kinase 3 [Homo sapiens] | 81 | 333 | 1 | 261 |
| H | Ribosomal protein S6 kinase, 52 kD, polypeptide 1 [Homo sapiens] | 225 | 459 | 1 | 261 |
| H | Ribosomal protein S6 kinase, 90 kD, polypeptide 6 [Homo sapiens] | 73 & 428 | 330 & 883 | 1 | 261 |
| H | Unknown [Homo sapiens] | 153 | 539 | 1 | 261 |
| H | SGK [Homo sapiens] | 98 | 355 | 1 | 261 |
| M | Serum/glucocorticoid regulated kinase [Mus musculus] | 98 | 354 | 1 | 261 |
| M | Protain kinase [Homo sapiens] | 1 | 169 | 24 | 261 |
| H | SGK-like protein SGKL [Homo sapiens] | 182 | 369 | 1 | 261 |
| H | Protein tyrosine kinase 9-like (A6-related protein) [Homo sapiens] | 10 | 17 | 253 | 261 |
| H | Phosphoprotein [Homo sapiens] | 40 | 333 | 1 | 261 |
| H | DCAMKL1 (DOUBLECORTIN-LIKE AND CAM KINASE-LIKE 1) | 368 | 625 | 1 | 261 |
| M | CPG 16 [Mus musculus] | 59 | 297 | 1 | 261 |
| H | DCAMKL1 (DOUBLECORTIN-LIKE AND CAM KINASE-LIKE 1) | 415 | 673 | 1 | 261 |
| M | CPG 16 [Mus musculus] | 514 | 771 | 1 | 261 |
| H | Death-associated protein kinase-related 2 | 33 | 293 | 1 | 261 |
| M | Death-associated protein kinase-related 2 | 32 | 293 | 1 | 261 |
| H | Death-associated protein kinase-related 1 | 61 | 321 | 1 | 261 |
| H | KIAA0999 protein [Homo sapiens] | 8 | 259 | 1 | 261 |
| H | Hypothetical protein F49C.4 - [Caenorhabditis elegans] | 74 | 325 | 1 | 261 |
| H | Cdc25C associated protein kinace C_TAK1 [Homo sapiens] | | | | |
| H | Cdc25C associated protein kinace C_TAK1 [Homo sapiens] | 56 | 307 | 1 | 261 |
| M | R31237_1, partial CDS [Homo sapiens] | 59 | 340 | 1 | 261 |
| H | KIAA0135 gene is related to plm-1 oncogene. [Homo sapiens] | 999 | 1258 | 1 | 261 |
| M | KIAA0135 gene, related to plm-1 oncogene. [Homo sapiens] | 1 | 158 | 23 | 261 |
| H | KIAA0781 protein [Homo sapiens] | 20 | 271 | 1 | 261 |
| H | KIAA0537 gene product [Homo sapiens] | 53 | 304 | 1 | 261 |
| H | Hormonally upregulated neu tumor-associated kinase [Homo sa [symbol] | 61 | 320 | 1 | 261 |
| H | Skeletal muscle myosin light chain kinase [Galus gallus] | 570 | 625 | 1 | 261 |
| H | KIAA1297 [Homo sapiens] | 620 & 1086 | 873 & 1356 | 1 | 261 |
| M | KIAA1297 [Homo sapiens] | 3 | 78 | 186 | 261 |
| H | STK with Dbl- and pleckstrin homology domains [Homo sapiens] | 985 | 1239 | 1 | 261 |
| H | MLCK [Dictyostelium discoideum] | 116 | 381 | 1 | 261 |
| H | CG11533 gene product [Drosophila melanogaster] | 34 | 313 | 1 | 261 |
| H | CG11533 gene product [Drosophila melanogaster] | 21 | 471 | 1 | 261 |
| H | PFTAIRE protein kinase 1 [Homo sapiens] | 1 | 218 | 23 | 261 |
| H | Cyclin-dependent kinase-like 1 (CDC2-related kinase) [Homo sa [symbol] | 1 | 191 | 23 | 261 |
| M | Cyclin-dependent kinase-like 1 (CDC2-related kinase) [Homo sa [symbol] | 1 | 240 | 24 | 261 |
| H | CDC2-related protein kinase 7 [Homo sapiens] | 21 | 1020 | 1 | 261 |
| H | NKIAMRE [Homo sapiens] | 4 | 385 | 1 | 261 |
| M | NKIATRE alpha [Rattus norvegicus] | 1 | 28 | 235 | 261 |
| M | Call cycle related kinase [Homo sapiens] | 1 | 153 | 134 | 261 |
| H | Cyclin-dependent kinase-like 1 (CDC2-related kinase) [Homo sa [symbol] | 177 | 493 | 1 | 261 |
| H | Extracellular signal-regulated kinase 7; ERK7 [Rattus norvegicus | 13 | 305 | 1 | 261 |
| H | Renal tumor antigen [Homo sapiens] | 4 | 285 | 1 | 261 |
| H | Intestinal cell kinase [Homo sapiens] | 4 | 284 | 1 | 261 |
| M | MLCK [Rattus norvegicus] | 109 | 364 | 1 | 261 |
| H | CG10673 gene product [Drosophila melanogaster] | 101 | 187 | 65 | 147 |
| H | Hypothetical protein [Homo sapiens] | 2 | 267 | 1 | 261 |
| M | Hypothetical protein [Homo sapiens] | 59 | 86 | 235 | 261 |
| H | KIAA0344 gene product [Homo sapiens] | 221 | 479 | 1 | 261 |
| H | Nuclear receptor binding protein [Homo sapiens] | 73 | 327 | 1 | 261 |
| M | Nuclear receptor binding protein [Homo sapiens] | 1 | 170 | 85 | 261 |
| H | Ca2+/calmodulin-dependent protein kinase beta [Homo s [symbol] | 165 | 448 | 1 | 261 |
| H | Hypothetical 33.6K protein - rabbit fibroma virus | 24 | 285 | 1 | 261 |
| H | Nuclear body associated kinase 1a [Mus musculus] | 199 | 527 | 1 | 261 |
| H | Dual-specificity tyrosine-(Y)-phosphorylation regulated kinase 3 | 174 | 487 | 1 | 261 |
| M | Dual-specificity tyrosine-(Y)-phosphorylation regulated kinase 3 | 76 | 103 | 235 | 261 |
| H | GCN2 eIF2alpha kinase [Mus musculus] | 280 & 590 | 639 & 1001 | 1 | 261 |
| H | Homo-regulated initiation factor 2-alpha kinase [Homo sapiens] | 167 | 583 | 1 | 261 |
| H | CG10673 gene product [Drosophila melanogaster] | 101 | 187 | 65 | 147 |
| M | (AE003567) CG10673 gene product [Drosophila melanogaster] | 116 | 150 | 116 | 147 |
| H | Interleukin-1 receptor-associated kinase M [Homo sapiens] | 165 | 443 | 1 | 261 |
| M | Interleukin-1 receptor-associated kinase M [Homo sapiens] | 1 | 239 | 19 | 261 |
| H | Ira1, inositol-requiring 1 gene [Mus musculus] | 516 | 777 | 1 | 261 |
| H | CG8173 gene product [Drosophila melanogaster] | 32 | 318 | 1 | 261 |
| M | CG8173 gene product [Drosophila melanogaster] | 12 | 266 | 1 | 261 |
| M | testis-specific kinase 2 [Homo sapiens] | 12 | 39 | 101 | 128 |
| H | Mixed lineage kinase [Homo sapiens] | 16 | 259 | 1 | 261 |
| H | Putative protein-tyrosine kinase [Homo sapiens] | 463 | 723 | 1 | 261 |
| H | KIAA0472 protein [Homo sapiens] | 357 | 620 | 1 | 261 |
| M | Receptor interacting protein 3 [Mus musculus] | 7 | 27 | 161 | 202 |
| H | Hypothetical protein [Homo sapiens] | 57 | 63 | 50 | 78 |
| H | KIAA1360 protein [Homo sapiens] | 32 | 327 | 1 | 261 |
| H | CG1973 gene product [Drosophila melanogaster] | 65 | 131 | 47 | 116 |
| H | Unnamed protein product [Homo sapiens] | 230 | 305 | 81 | 143 |
| H | Serine/threonine kinase 23 [Homo sapiens] | 79 | 531 | 1 | 261 |
| H | Serine/threonine kinase 22A (spermiogenesis associated) [Mus [symbol] | 10 | 265 | 1 | 261 |
| M | Serine/threonine kinase 22B (spermiogenesis associated) | 10 | 265 | 1 | 261 |
| H | Serine/threonine kinase 22A (spermiogenesis associated) | 25 | 280 | 1 | 261 |
| H | Serine/threonine kinase 22B (spermiogenesis associated) [Mus [symbol] | 12 | 272 | 1 | 261 |
| H | Serine/threonine kinase 22A (spermiogenesis associated) | 12 | 267 | 1 | 261 |
| H | Serine/threonine kinase 22B (spermiogenesis associated) | 1 | 213 | 7 | 261 |
| H | Putative protein kinase [Arabidopsis thaliana] | 1 | 329 | 1 | 261 |
| M | UNC-51-like kinase (ULK) 2 [Mus musculus] | 80 | 408 | 1 | 261 |
| H | UNC-51-like kinase (ULK) 2 [Mus musculus] | 8 | 340 | 1 | 261 |
| H | Hypothetical protein DKFZp434C131.1 - human (fragment) | 57 | 313 | 1 | 261 |
| H | Unnamed protein product [Homo sapiens] | 4 | 265 | 1 | 261 |
| H | Serum-Inducible kinase [Homo sapiens] | 1 | 39 | 84 | 124 |
| M | Serine/threonine protein kinase like protein [Arabidopsis thaliane | 80 | 159 | 1 | 86 |
| H | KIAA1264 protein [Homo sapiens] | 1 | 246 | 25 | 261 |
| M | Tie gene product [Drosphila melanogaster] | 9 | 104 | 168 | 261 |
| H | SALIVARY PROLINE-RICH PROTEIN PO(ALLELE K)[HOME [symbol] | 1 | 272 | 16 | 73 |
| M | testis-specific kinase 1 [Homo sapiens] | 68 | 96 | 42 | 71 |
| H | Vaccinia related kinase 3 [Homo sapiens] | 247 | 318 | 63 | 136 |
| M | (AB031052) vaccinia related kinase 3 [Homo sapiens] | 7 | 78 | 63 | 136 |
| H | MPSK [Homo sapiens] | 20 | 290 | 1 | 261 |
| H | CG4523 gene product [Drosphila melanogaster] | 156 | 507 | 1 | 261 |
| H | NEK1 (NIMA-RELATED PROTEIN KINASE 1) [Mus musculus] | 4 | 251 | 1 | 261 |
| H | (AC007055) unknown [Homo sapiens] | 52 | 305 | 1 | 261 |
| H | mitogen-activated protein kinase kinase kinase 6 [Homo sapiens] | 376 | 629 | 6 | 261 |
| H | (AB040812) protein kinase PAK5 [Homo sapiens] | 449 | 700 | 1 | 261 |
| H | (U40827) protein lyrosine kinase [Mus musculus] | 167 | 453 | 1 | 261 |
| M | fibroblast growth factor receptor 3 [Mus musculus] | 8 | 143 | 123 | 261 |
| H | SGK2alpha protein kinase [Homo sapiens] | 35 | 292 | 1 | 261 |
| H | Cell cycle related kinase [Homo sapiens] | 4 | 267 | 1 | 261 |
| H | Testis-specific kinase 2 [Homo sapiens] | 62 | 293 | 5 | 261 |

[0434] TABLE 3

| T [symbol] | T [symbol] | 3 [symbol] | T [symbol] | T [symbol] | [symbol] | E [symbol] | [symbol] 3 | [symbol] | [symbol] | [symbol] | [symbol] | [symbol] | [symbol] | [symbol] | [symbol] | [symbol] |
|---|---|---|---|---|---|---|---|---|---|---|---|---|---|---|---|---|
| [symbol] -h | | 1 | | | | | | [symbol] | 137 | [symbol] 721 | [symbol] | 24705 | [symbol] | [symbol] | [symbol] | 13163 |
| [symbol] -h | | 2 | | | | | | 8131 | 32 [symbol] | 12 [symbol] | 114237 | [symbol] 18 | [symbol] | [symbol] | [symbol] | [symbol] |
| [symbol] -h | | 3 | | | | | | [symbol] | [symbol] | 3477 [symbol] | [symbol] 267 | 32237 | 33 [symbol] | [symbol] | [symbol] | [symbol] |
| [symbol] -h | | 4 | | | | | | 984 | 276 | 105547 | 42231 | 4318 | 1234 | [symbol] | [symbol] | 2293 |
| [symbol] -h | | 5 | | | | | | [symbol] | [symbol] 23 | 239783 | [symbol] 23 | [symbol] | [symbol] | 7734 | [symbol] | [symbol] |
| [symbol] -h | | 6 | | | | | | [symbol] 73 | 2674 | [symbol] | [symbol] | [symbol] | [symbol] | 11 [symbol] | 71 [symbol] | 12 [symbol] |
| [symbol] -h | | 7 | | | | | | 8358 | [symbol] | [symbol] 23 | [symbol] | [symbol] | [symbol] | [symbol] | [symbol] | [symbol] |
| [symbol] -h | | 8 | | | | | | 8542 | [symbol] | [symbol] | [symbol] | [symbol] 73 | 11 [symbol] | 29 [symbol] | 83 [symbol] | 12 [symbol] |
| [symbol] -h | | 9 | | | | | | 15 [symbol] | [symbol] | [symbol] | [symbol] | [symbol] | [symbol] | [symbol] 81 | [symbol] | [symbol] |
| [symbol] -h | | 10 | | | | | | 6783 | 13 [symbol] | 12 [symbol] | [symbol] | [symbol] | [symbol] | [symbol] | 80242 | [symbol] |
| [symbol] -h | | 11 | | | | | | 4797 | [symbol] | 837527 | [symbol] | [symbol] | 31171 | [symbol] | [symbol] | [symbol] |
| [symbol] -h | | 12 | | | | | | 3477 | 1794 | [symbol] | [symbol] | [symbol] | [symbol] | [symbol] | [symbol] 27 | [symbol] |
| [symbol] -h | | 13 | | | | | | 3397 | [symbol] | [symbol] 11 | [symbol] | 24129 | [symbol] | [symbol] | [symbol] 27 | [symbol] |
| [symbol] -h | | 14 | | | | | | 2725 | [symbol] | 429781 | 37 [symbol] | 277 [symbol] | 11433 | [symbol] | [symbol] | [symbol] |
| [symbol] -h | | 15 | | | | | | [symbol] | [symbol] | [symbol] | [symbol] | [symbol] | 31811 | [symbol] | [symbol] | [symbol] |
| [symbol] -h | | 16 | | | | | | 8493 | [symbol] | [symbol] | [symbol] | 12319 | [symbol] | [symbol] | [symbol] | [symbol] |
| [symbol] -h | | 17 | | | | | | 3912 | 1915 | [symbol] | [symbol] | [symbol] | [symbol] | 11717 | [symbol] | [symbol] |
| [symbol] -h | | 18 | | | | | | [symbol] | [symbol] | [symbol] 318 | [symbol] | [symbol] | 11720 | 12229 | [symbol] | [symbol] |
| [symbol] -h | | 19 | | | | | | 2439 | [symbol] | [symbol] | [symbol] | [symbol] | 7829 | [symbol] | [symbol] | [symbol] |
| [symbol] -h | | 20 | | | | | | 5184 | [symbol] | [symbol] | [symbol] | [symbol] | [symbol] | [symbol] | [symbol] | [symbol] |
| [symbol] -h | | 21 | | | | | | 2783 | 4479 | [symbol] | [symbol] | [symbol] | 11589 | [symbol] | [symbol] | [symbol] |
| [symbol] -h | | 22 | | | | | | [symbol] | [symbol] | [symbol] | 49111 | [symbol] | [symbol] | [symbol] | [symbol] | [symbol] |
| [symbol] -h | | 23 | | | | | | 4121 | 1921 | [symbol] | 25413 | 25247 | 10839 | 4418 | [symbol] | 7084 |
| [symbol] -h | | 24 | | | | | | [symbol] | 419 | [symbol] | [symbol] | [symbol] | 3479 | [symbol] | [symbol] | [symbol] |
| [symbol] -h | | 25 | | | | | | 4642 | [symbol] | [symbol] | [symbol] 41 | [symbol] | 117943 | [symbol] | [symbol] | [symbol] |
| [symbol] -h | | 27 | | | | | | [symbol] | [symbol] | [symbol] | [symbol] | [symbol] | [symbol] | 21139 | [symbol] | [symbol] |
| [symbol] LC | | 28 | | | | 74 | | [symbol] | 0 | [symbol] | 34171 | [symbol] | [symbol] | [symbol] | [symbol] | [symbol] |
| [symbol] -h | | 29 | | | | | | 2479 | 1073 | 194311 | [symbol] | [symbol] | [symbol] | [symbol] | [symbol] | [symbol] |
| [symbol] LC | | 30 | | | | 29 | | 24571 | 1923 | [symbol] | [symbol] | 3237 | [symbol] | [symbol] | 42340 | [symbol] |
| [symbol] -h | | 31 | | | | | | 8274 | 3082 | [symbol] | [symbol] | [symbol] | [symbol] | [symbol] | [symbol] | [symbol] |
| [symbol] EC | | 32 | | | | | | 7791 | [symbol] | [symbol] | [symbol] | [symbol] | 4775 | 11713 | [symbol] | [symbol] |
| [symbol] -h | | 33 | | | | | | [symbol] | [symbol] | [symbol] | [symbol] | [symbol] | 34729 | [symbol] | [symbol] | [symbol] |
| HCAEC | | 34 | | | | | | [symbol] | 0 | [symbol] | [symbol] | [symbol] | [symbol] | [symbol] | [symbol] | [symbol] |
| [symbol] -h | | 35 | | | | | | [symbol] | 913 | 41543 | [symbol] | [symbol] | 8149 | [symbol] | [symbol] | [symbol] |
| [symbol] -h | | 36 | | | | | | 8123 | 731 | 47839 | 19781 | 20729 | 9429 | [symbol] | [symbol] | [symbol] |
| [symbol] -h | | 37 | | | | | | [symbol] | 77 | 0 | [symbol] | 9411 | [symbol] | [symbol] | [symbol] | [symbol] |
| [symbol] -h | | 38 | | | | | | [symbol] | 2171 | [symbol] | [symbol] | [symbol] | [symbol] | 2447 | 34121 | [symbol] |
| [symbol] -h | | 39 | | | | | | [symbol] | 2472 | [symbol] | [symbol] | [symbol] | 2515 | [symbol] | [symbol] | [symbol] |
| [symbol] -h | | 40 | | | | | | [symbol] | 2472 | [symbol] | [symbol] | [symbol] | [symbol] | 1592 | 79722 | [symbol] |
| [symbol] -h | | 41 | | | | | | 2979 | 0 | [symbol] | [symbol] | [symbol] | [symbol] | [symbol] | 42181 | [symbol] |
| [symbol] -h | | 42 | | | | | | [symbol] | [symbol] | 21473 | [symbol] | 18311 | 13419 | [symbol] | [symbol] | [symbol] |
| [symbol] -h | | 43 | | | | | | [symbol] | 0 | 9314 | 11344 | 12177 | 4129 | 2283 | [symbol] | [symbol] |
| [symbol] -h | | 44 | | | | | | [symbol] | [symbol] | [symbol] | [symbol] | [symbol] | 17833 | [symbol] | [symbol] | [symbol] |
| WT2 [symbol] | | | | | 243 | | | 115 | 357 | 9191 | [symbol] | [symbol] | [symbol] | 134 | [symbol] | [symbol] |
| WT2 [symbol] | | | | | 343 | | | 0 | 427 | 9712 | [symbol] | 0 | 144 | [symbol] | [symbol] | [symbol] |
| WT1 [symbol] | | | | | 391 | | | 0 | 15 | 26479 | 2724 | 725 | [symbol] | [symbol] | [symbol] | [symbol] |
| [symbol] -13 | | | | | 356 | 354 | | 23 | 1684 | 543114 | [symbol] | [symbol] | [symbol] | [symbol] | [symbol] | [symbol] |
| [symbol] -12 | | | | | 354 | 354 | | 11259 | 1283 | [symbol] | [symbol] | 9438 | [symbol] | 2467 | [symbol] | [symbol] |
| [symbol] -h | | | | | 284 | | | 0 | 242 | [symbol] | [symbol] | 1746 | [symbol] | [symbol] | [symbol] | [symbol] |
| [symbol] -h | | | | | 342 | | | 0 | 543 | 20541 | [symbol] | 0 | 2454 | 2223 | [symbol] | [symbol] |
| R*TEC | | | | | 334 | 334 | | 1977 | 0 | [symbol] | 24733 | [symbol] | 323 | 6057 | [symbol] | [symbol] |
| [symbol] -h | | | | | 322 | | | 704 | 0 | 1241 | 7347 | 7053 | [symbol] | 1180 | [symbol] | [symbol] |
| [symbol] | | | | | 330 | | | 905 | 0 | 9314 | 2447 | 1944 | 0 | 140 | [symbol] | [symbol] |
| [symbol] -h | | | | | 328 | | | 7120 | 318 | 191277 | 49029 | 19433 | [symbol] | 2972 | [symbol] | [symbol] |
| HT3 [symbol] | | | | | 327 | | | [symbol] | 0 | [symbol] | 8223 | 320 | [symbol] | 832 | [symbol] | [symbol] |
| [symbol] -h | | | | | 324 | | | 6734 | 80 | [symbol] | [symbol] | 10538 | 7917 | [symbol] | [symbol] | [symbol] |
| HT1 [symbol] | | | | | 321 | | | 187 | 61 | [symbol] | 2927 | 0 | 139 | 1743 | [symbol] | [symbol] |
| HE [symbol] | | | | | [symbol] | | | 3252 | 0 | [symbol] | 12132 | [symbol] | 4353 | 2348 | 61918 | [symbol] |
| [symbol] -h | | | | | 318 | | | 4313 | [symbol] | [symbol] | [symbol] | [symbol] | 31221 | [symbol] | [symbol] | [symbol] |
| [symbol] -h | | | | | 316 | | | 4443 | 254 | [symbol] | [symbol] | [symbol] | [symbol] | 4790 | [symbol] | [symbol] |
| [symbol] -h | | | | | 334 | | | 3520 | 841 | [symbol] | [symbol] | [symbol] | [symbol] | [symbol] | [symbol] | [symbol] |
| [symbol] -h | | | | | 311 | | | [symbol] | 447 | [symbol] | [symbol] | [symbol] | [symbol] | [symbol] | [symbol] | 11249 |
| [symbol] -h | | | | | 309 | | | 45 | [symbol] | [symbol] | [symbol] | 1434 | [symbol] | [symbol] | [symbol] | [symbol] |
| [symbol] -h | | | | | 307 | | | 1276 | 0 | [symbol] | [symbol] | [symbol] | [symbol] | [symbol] | [symbol] | [symbol] |
| [symbol] -h | | | | | 393 | | | 183 | 907 | [symbol] | [symbol] | [symbol] | [symbol] | [symbol] | 44917 | [symbol] |
| [symbol] -h | | | | | 303 | | | 1134 | 700 | [symbol] | 24295 | 8124 | [symbol] | [symbol] | [symbol] | [symbol] |
| [symbol] -h | | | | | 292 | | | [symbol] | 0 | [symbol] | [symbol] | [symbol] | [symbol] | [symbol] | [symbol] | [symbol] |
| [symbol] -h | | | | | 294 | | | 4247 | 11127 | [symbol] | [symbol] | [symbol] | [symbol] | [symbol] | [symbol] | [symbol] |
| [symbol] -h | | | | | 287 | | | 2938 | 1244 | [symbol] | [symbol] | [symbol] | [symbol] | [symbol] | [symbol] | [symbol] |
| [symbol] -h | | | | | 298 | | | 94 | 1547 | [symbol] | [symbol] | 9794 | [symbol] | [symbol] | [symbol] | [symbol] |
| [symbol] -h | | | | | 234 | | | 2252 | [symbol] | [symbol] | 25447 | 14737 | [symbol] | 3701 | [symbol] | [symbol] |
| [symbol] -h | | | | | 282 | | | 195 | 115 | [symbol] | 12005 | 3217 | [symbol] | [symbol] | [symbol] | [symbol] |
| [symbol] -h | | | | | 299 | | | 1375 | 1452 | 417579 | 27541 | 12419 | [symbol] | [symbol] | [symbol] | [symbol] |
| [symbol] -h | | | | | 273 | | | 0 | [symbol] | 34547 | 2711 | [symbol] | 2421 | [symbol] | [symbol] | [symbol] |
| [symbol] -h | | | | | 277 | | | 0 | 2174 | [symbol] | 4719 | 2539 | [symbol] | [symbol] | [symbol] | [symbol] |
| HPALC | | | | | 275 | 276 | | 991 | 123 | 4987 | [symbol] | [symbol] | 532 | 1082 | [symbol] | 7713 |
| HT2 [symbol] | | | | | [symbol] | | | 0 | 59 | [symbol] | 4487 | 0 | [symbol] | [symbol] | [symbol] | [symbol] |
| HT2 [symbol] | | | | | [symbol] | | | 253 | [symbol] | [symbol] | [symbol] | [symbol] | [symbol] | [symbol] | [symbol] | [symbol] |
| [symbol] -11 | | | | | 230 | 239 | | 1719 | 4284 | [symbol] | [symbol] | [symbol] | [symbol] | [symbol] | [symbol] | [symbol] |
| [symbol] - | | | | | 224 | 231 | | 41 | [symbol] | [symbol] | 8231 | [symbol] | [symbol] | [symbol] | [symbol] | [symbol] |
| HT373- [symbol] | | | | | 234 | | | 757 | 0 | [symbol] | [symbol] | [symbol] | 8133 | [symbol] | [symbol] | [symbol] |
| [symbol] -7 | | | | | 233 | 233 | | 0 | [symbol] | [symbol] | 7274 | 2074 | [symbol] | [symbol] | [symbol] | [symbol] |
| [symbol] -4 | | | | | 231 | 231 | | 291 | 2454 | 49149 | 7943 | 8703 | 8477 | 7340 | [symbol] | [symbol] |
| [symbol] -2 | | | | | 229 | 229 | | [symbol] | [symbol] | 74913 | [symbol] | [symbol] | 7022 | 3423 | [symbol] | [symbol] |
| [symbol] -1 | | | | | 227 | 227 | | [symbol] | 4934 | [symbol] | [symbol] | 11203 | 4547 | [symbol] | [symbol] | [symbol] |
| [symbol] -h | | | | | 222 | | | 328 | 459 | 5047 | [symbol] | [symbol] | 3423 | 171 | [symbol] | [symbol] |
| [symbol] -h | | | | | 218 | | | 942 | 0 | [symbol] | [symbol] | [symbol] | [symbol] | [symbol] | [symbol] | [symbol] |
| [symbol] -h | | | | | 214 | | | [symbol] | 1512 | [symbol] | [symbol] | 3792 | [symbol] | 17311 | [symbol] | [symbol] |
| [symbol] -h | | | | | 212 | | | 854 | 647 | [symbol] | [symbol] | [symbol] | [symbol] | [symbol] | [symbol] | 6130 |
| [symbol] -h | | | | | 212 | | | 522 | 1972 | [symbol] | 5781 | 2184 | [symbol] | 1232 | [symbol] | [symbol] |
| HCAEC | | | | | 211 | 211 | | 143 | 0 | 8183 | [symbol] | 184 | [symbol] | 1143 | 24737 | [symbol] |
| [symbol] -h | | | | | 210 | | | [symbol] | 3127 | [symbol] | [symbol] | [symbol] | [symbol] | [symbol] | [symbol] | [symbol] |
| HMEC | | | | | 209 | | | [symbol] | [symbol] | 8034 | 8400 | 0 | 214 | [symbol] | [symbol] | [symbol] |
| [symbol] -h | | | | | 206 | | | 1 | 0 | [symbol] | [symbol] | [symbol] | 1141 | [symbol] | [symbol] | [symbol] |
| [symbol] -h | | | | | 203 | | | 423 | 16 | [symbol] | 1437 | 3994 | 4309 | 991 | [symbol] | [symbol] |
| [symbol] -h | | | | | 291 | | | 415 | [symbol] | [symbol] | [symbol] | [symbol] | [symbol] | [symbol] | [symbol] | [symbol] |
| [symbol] -h | | | | | 183 | | | 130 | 134 | 1142 | [symbol] | 2327 | [symbol] | 247 | [symbol] | [symbol] |
| [symbol] -h | | | | | 187 | | | 438 | 16 | [symbol] | 4851 | 2304 | 1218 | 742 | [symbol] | 4117 |
| [symbol] | | | | | 196 | | | 82 | 0 | 4377 | [symbol] | [symbol] | 1231 | 374 | 21318 | [symbol] |
| [symbol] -h | | | | | 193 | | | [symbol] | 0 | [symbol] | [symbol] | [symbol] | [symbol] | [symbol] | [symbol] | [symbol] |
| [symbol] | | | | | 174 | | | 0 | 0 | [symbol] | 2183 | 0 | [symbol] | 0 | 21244 | 1771 |
| [symbol] -h | | | | | 91 | | | 314 | 273 | [symbol] | [symbol] | [symbol] | 4234 | [symbol] | [symbol] | [symbol] |
| [symbol] -h | | | | | [symbol] | | | 737 | [symbol] | [symbol] | [symbol] | [symbol] | [symbol] | [symbol] | [symbol] | [symbol] |
| [symbol] -h | | | | | 57 | | | 0 | 234 | [symbol] | [symbol] | 2152 | [symbol] | 4 | [symbol] | [symbol] |
| [symbol] -h | | | | | 54 | | | 0 | 1134 | [symbol] | [symbol] | 3702 | 4377 | 442 | 37903 | [symbol] |
| [symbol] -h | | | | | 53 | | | 0 | 1323 | [symbol] | [symbol] | 732 | 1175 | [symbol] | [symbol] | [symbol] |
| [symbol] -h | | | | | 51 | | | 277 | 841 | [symbol] | [symbol] | [symbol] | [symbol] | [symbol] | [symbol] | 4737 |
| [symbol] -h | | | | | [symbol] | | | 1379 | 744 | [symbol] | [symbol] | 2313 | [symbol] | 1472 | [symbol] | [symbol] |
| HELA- [symbol] -031 [symbol] | | | | 79 | | | | [symbol] | 2343 | [symbol] | 4142 | [symbol] | [symbol] | [symbol] | [symbol] | [symbol] |
| HELA- [symbol] -031 [symbol] | | | | 81 | | | | [symbol] | [symbol] | [symbol] | 3757 | [symbol] | 4922 | [symbol] | [symbol] | [symbol] |
| HELA- [symbol] -031 [symbol] | | | | 82 | | | | 935 | [symbol] | [symbol] | 3429 | [symbol] | [symbol] | [symbol] | [symbol] | [symbol] |
| HELA- [symbol] -031 [symbol] | | | | 83 | | | | 944 | [symbol] | [symbol] | [symbol] | [symbol] | [symbol] | [symbol] | [symbol] | [symbol] |
| HELA- [symbol] -031 [symbol] | | | | [symbol] | | | | 1271 | [symbol] | [symbol] | [symbol] | 4751 | [symbol] | [symbol] | [symbol] | [symbol] |
| HELA- [symbol] -031 [symbol] | | | | [symbol] 3 | | | | 323 | 416 | [symbol] | [symbol] | [symbol] | [symbol] | [symbol] | [symbol] | [symbol] |
| HELA-10h-031 [symbol] | | | | [symbol] 2 | | | | 419 | [symbol] | [symbol] | [symbol] | [symbol] | [symbol] | 5137 | [symbol] | [symbol] |
| HELA-11h-031 [symbol] | | | | [symbol] 4 | | | | 0 | 0 | [symbol] | [symbol] | 312 | [symbol] | [symbol] | [symbol] | [symbol] |
| HELA-12h-031 [symbol] | | | | [symbol] | | | | 0 | [symbol] | [symbol] | 3207 | [symbol] | [symbol] | [symbol] | [symbol] | [symbol] |
| MC1- [symbol] | | | | 148 | | | | 1454 | 244 | [symbol] | [symbol] | [symbol] | [symbol] | [symbol] | [symbol] | [symbol] |
| MC2- [symbol] | | | | 144 | | | | 1834 | 164 | [symbol] | [symbol] | [symbol] | [symbol] | [symbol] | [symbol] | [symbol] |
| MC3- [symbol] | | | | 150 | | | | 913 | 254 | [symbol] | [symbol] | [symbol] | [symbol] | [symbol] | [symbol] | [symbol] |
| [symbol] -19 | | | | 152 | | | | 1113 | 0 | [symbol] | 1124 | [symbol] | [symbol] | 0 | [symbol] | [symbol] |
| [symbol] -75 | | | | 154 | | | | 1194 | 0 | [symbol] | 3794 | [symbol] | [symbol] | [symbol] | [symbol] | [symbol] |
| [symbol] -288 | | | | 156 | | | | 231 | 0 | [symbol] | [symbol] | [symbol] | [symbol] | 447 | [symbol] | [symbol] |
| [symbol] -295 | | | | 158 | | | | 0 | 342 | [symbol] | [symbol] | [symbol] | 892 | 378 | [symbol] | [symbol] |
| CCRY-CRM | | | | 160 | | | | 1991 | 274 | [symbol] | 317 | [symbol] | [symbol] | 418 | [symbol] | [symbol] |
| DU-145 | | | | 162 | | | | 209 | 425 | 7542 | [symbol] | [symbol] | [symbol] | 118 | [symbol] | [symbol] |
| MCT 115 | | | | 154 | | | | 121 | 0 | 21002 | [symbol] | [symbol] | [symbol] | [symbol] | [symbol] | 1953 |
| mo SAIT | 156 | | | | | | | 13873 | 0 | [symbol] 24 | [symbol] 41 | 16731 | 12712 | [symbol] | [symbol] | 6334 |
| mo SAVT | 153 | | | | | | | 13427 | 1232 | 37438 | [symbol] | 8797 | 5704 | [symbol] | [symbol] | 51 [symbol] |
| MCP [symbol] | 151 | | | | | | | 15337 | 1085 | [symbol] 7 | 12914 | 21779 | 1 [symbol] | 10792 | 87 [symbol] 0 | 9415 |
| M14 | 143 | | | | | | | 8482 | 145 | 2 [symbol] 14 | 17174 | 16734 | 183 [symbol] 4 | 2844 | 63303 | 4 [symbol] 20 |
| UACC-257 | 142 | | | | | | | 11438 | 0 | 1888 [symbol] | [symbol] 7 | 10437 | 12037 | 41 [symbol] | 2 [symbol] | 2737 |
| UACC-42 | 143 | | | | | | | 3456 | 123 | 14725 | 21877 | 11114 | 27 [symbol] 4 | 1820 | 27441 | 4941 |
| [symbol] MEL-28 | 144 | | | | | | | 4479 | 0 | 390827 | 13781 | 7222 | 2 [symbol] 47 | 2124 | 2 [symbol] 1 | [symbol] 24 |
| UP-31 | 143 | | | | | | | 8347 | 0 | 242414 | 19130 | [symbol] 7 | 23333 | 41 [symbol] | 1 [symbol] 230 | 8343 |
| S [symbol] -MEL-4 | 142 | | | | | | | 5444 | 680 | 43 [symbol] | [symbol] | [symbol] 34 | 3 [symbol] 782 | 70 [symbol] | 2 [symbol] 01 | 12 [symbol] 2 |
| MCM-12 | 141 | | | | | | | 6633 | 377 | 43670 | 12 [symbol] | [symbol] | 4823 | 71 [symbol] | 3 [symbol] 2 | 3132 |
| SOC-MEL-2 | 140 | | | | | | | 29 [symbol] | 331 | 391883 | [symbol] 6 | 13817 | 13 [symbol] 741 | 1004 | 20577 | 5700 |
| MCT- [symbol] | 139 | | | | | | | 1187 | 0 | 362064 | 14372 | [symbol] 230 | 11433 | [symbol] 78 | 14730 | 18341 |
| M [symbol] -2 [symbol] | 138 | | | | | | | [symbol] | 0 | 403464 | 1 [symbol] 20 | [symbol] 70 | 21371 | 5334 | 45000 | 7827 |
| COLO [symbol] | 137 | | | | | | | 6249 | 0 | 384338 | 1 [symbol] | 8560 | 11 [symbol] 1 | 4 [symbol] | 877 [symbol] | [symbol] |
| LO [symbol] | 136 | | | | | | | 4339 | 294 | 1470004 | 237 [symbol] 3 | 18725 | 23414 | [symbol] | 200000 | 1815 |
| S [symbol] -4 [symbol] | 135 | | | | | | | 11829 | 0 | 822854 | 1 [symbol] 64 | [symbol] 62 | [symbol] 4 | 7213 | 3 [symbol] | 1702 |
| TW-10 | 134 | | | | | | | 3634 | 1142 | 232633 | 21183 | 1832 | [symbol] 2 | [symbol] 041 | 4 [symbol] 7 | [symbol] |
| MCT 110 | 133 | | | | | | | 3482 | 0 | 160614 | 13 [symbol] | 73 [symbol] | [symbol] | 40 [symbol] | 37000 | 8317 |
| 70 [symbol] -0 | 132 | | | | | | | 3284 | 0 | 3 [symbol] 64 | 17729 | 4 [symbol] 2 | 13 [symbol] 4 | 2041 | 34171 | [symbol] 7 |
| HCC-23 [symbol] | 131 | | | | | | | [symbol] 70 | 2737 | 3 [symbol] 8 | 179 [symbol] | 17 [symbol] | 1 [symbol] | 3371 | [symbol] | [symbol] |
| AC [symbol] | 130 | | | | | | | 6662 | 117 | 84811 | [symbol] | 10054 | 6438 | [symbol] | 3 [symbol] 0 | 5706 |
| PC-2 | 129 | | | | | | | 13 [symbol] | 0 | 4 [symbol] 24 | 14104 | 4879 | [symbol] 473 | 3508 | 343 [symbol] 2 | [symbol] 3 |
| [symbol] 3 [symbol] | 128 | | | | | | | [symbol] 33 | 278 | 4 [symbol] 33 | [symbol] | 7110 | 13004 | 3324 | 43444 | 1004 |
| OL [symbol] | 127 | | | | | | | 14823 | 134 | 30 [symbol] | 12131 | 3150 | 3 [symbol] 0 | 3261 | 37777 | 3307 |
| C [symbol] -1 | 126 | | | | | | | 3646 | 722 | 71294 [symbol] | 127140 | [symbol] | 13345 | 4217 | 38247 | [symbol] 7 |
| [symbol] | 125 | | | | | | | 35 [symbol] | 257 | 420391 | 13347 | [symbol] 20 | 10111 | 7543 | 378 [symbol] | 4327 |
| AC [symbol] | 124 | | | | | | | 8123 | 0 | 64309 | 140 [symbol] 0 | 41874 | 17 [symbol] | 4314 | [symbol] 104 | 8283 |
| [symbol] | 123 | | | | | | | 2276 | 0 | 372834 | 18300 | 5419 | 297 [symbol] | 1191 | [symbol] 0043 | [symbol] |
| [symbol] N [symbol] C | 122 | | | | | | | 6283 | 217 | 200477 | 17102 | 14334 | 29787 | 67 [symbol] | 32473 | 1267 |
| ML-40 | 121 | | | | | | | 11442 | 0 | 137022 | [symbol] | 63201 | 224 [symbol] 3 | 4184 | 384440 | 4200 |
| MCL T-4 | 120 | | | | | | | 4384 | 0 | 440060 | 127 [symbol] | 10231 | 18 [symbol] | 2 [symbol] 4 | 26300 | 4478 |
| OVCAR-1 | 119 | | | | | | | 3830 | 364 | [symbol] 25 | 14534 | 5452 | 41 [symbol] | 4117 | 25736 | [symbol] 34 |
| X- [symbol] | 118 | | | | | | | 2180 | 794 | 804729 | 14781 | [symbol] 5 | 20028 | 2300 | 54213 | [symbol] 030 |
| OVCAR-4 | 117 | | | | | | | 2854 | 3367 | 43 [symbol] 335 | 10520 | 8040 | 117 [symbol] 7 | [symbol] 1 | 42100 | 2303 |
| CC [symbol] -CDM | 116 | | | | | | | 4370 | 0 | 3 [symbol] 707 | 217 [symbol] 7 | 9518 | 81543 | [symbol] | 38120 | 4575 |
| OVCAR-3 | 115 | | | | | | | 3371 | 9 | 14 [symbol] 64 | 10 [symbol] 74 | 1044 | 21026 | 5119 | 52017 | 5413 |
| S [symbol] -638 | 114 | | | | | | | 4819 | 0 | [symbol] 2870 | 13841 | 4716 | 1 [symbol] 3 | 2834 | 3 [symbol] 5 | 5113 |
| HC [symbol] - [symbol] | 113 | | | | | | | 2174 | 384 | 345970 | 13734 | [symbol] 54 | 11834 | 3200 | 19676 | 4413 |
| SF-295 | 112 | | | | | | | 11905 | 218 | 98183 | 19707 | [symbol] 0 | 7154 | 2946 | 40830 | 1 [symbol] 2 |
| A [symbol] TCC | 111 | | | | | | | 17217 | [symbol] | 376850 | 27212 | 12354 | 1 [symbol] 17 | 6358 | 47430 | 8324 |
| SF-288 | 110 | | | | | | | 3084 | 1353 | 233341 | [symbol] | [symbol] 41 | 11 [symbol] 24 | 2370 | 30243 | 3718 |
| MCAH [symbol] | 109 | | | | | | | 4147 | 0 | 1128384 | 19211 | 19185 | 32502 | 318 [symbol] 3 | 44011 | [symbol] 45 |
| w291 | 108 | | | | | | | 9538 | 373 | 230300 | 107 [symbol] | [symbol] | 120 [symbol] | 11 [symbol] | 54075 | 8200 |
| MC- [symbol] | 107 | | | | | | | 6777 | 0 | 457383 | 13000 | [symbol] | 1 [symbol] 3 | 4430 | 2 [symbol] | 5244 |
| SN [symbol] -75 | 106 | | | | | | | 7578 | 630 | 27880 | 8030 | 323 | 9216 | 2822 | 41104 | 4 [symbol] 18 |
| MC- [symbol] | 105 | | | | | | | 6471 | 821 | 188027 | 19449 | 14479 | 18523 | 2322 | 42032 | 6532 |
| [symbol] M-19 | 104 | | | | | | | 7360 | 0 | 210001 | 17 [symbol] 44 | 7 [symbol] 4 | 12434 | 3100 | 50664 | 1744 |
| MC-M224 | 103 | | | | | | | 32964 | 310 | 106338 | [symbol] 4 | 10726 | 24181 | 3034 | 61587 | [symbol] 3 |
| SM-CM-3 | 102 | | | | | | | 8457 | 0 | 302788 | 16547 | 1470 | 11077 | 2287 | 33178 | 2004 |
| NCH [symbol] 23 | 101 | | | | | | | 5414 | 371 | 108502 | 12284 | 8342 | 15724 | [symbol] | 3 [symbol] | 3418 |
| [symbol] ROV1 | 100 | | | | | | | 13803 | 708 | 313545 | 14137 | [symbol] 515 | [symbol] 679 | 2 [symbol] 41 | 41000 | 3314 |
| [symbol] V [symbol] | 99 | | | | | | | 8228 | 1110 | 3 [symbol] 16 | 10012 | 6432 | 217 [symbol] | 3010 | 25017 | 3824 |
| OVCAR-6 | 98 | | | | | | | 12781 | 814 | 16774 | 10381 | 4170 | [symbol] 4 | 3120 | 31129 | 4019 |
| MCP- [symbol] 2 | 97 | | | | | | | 7808 | 0 | 397 [symbol] | 22816 | 4200 | 3 [symbol] 00 | 3 [symbol] 2 | 33300 | 3000 |
| [symbol] 3831492 [symbol] 12 | 48 | | | | | | | 130 [symbol] | 0 | 177631 | 14183 | [symbol] | [symbol] 047 | 3428 | 3200 | 4127 |
| in [symbol] C 102142 017 | 47 | | | | | | | 4478 | 137 | 8972 | 14410 | 1 [symbol] 0 | 3 [symbol] 4 | 5 [symbol] | 20037 | 3335 |
| in [symbol] 2025792 [symbol] | 44 | | | | | | | 13802 | 230 | 153425 | 321 [symbol] 4 | [symbol] | 14419 | 3871 | 29129 | 1 [symbol] 2 |
| TCCP | 25 | | | | | | | 6808 | 0 | [symbol] 454 | 15245 | 19200 | 19187 | 3430 | 22053 | 8471 |
| ASCS-1 | | | | | | | wt | 1421 | 5421 | 44209 | 11710 | 0 | 0 | 0 | 0 | 0 |
| ASCS-3 | | | | | | | wt | 130 | 4212 | 28334 | 6707 | 0 | 0 | 0 | 0 | 0 |
| ASCS-4 | | | | | | | wt | 278 | 8223 | 38473 | 1 [symbol] | 0 | 0 | 0 | 0 | 0 |
| ASCS-6 | | | | | | | wt | 440 | 2672 | 28000 | 10727 | 0 | 0 | 0 | 0 | 0 |
| ASCS-7 | | | | | | | wt | 148 | 182 | 18733 | 6765 | 0 | 0 | 0 | 0 | 0 |
| EKVX-1 | | | | | | | [symbol] | 844 | 1243 | [symbol] 4 | 16734 | 0 | 0 | 0 | 0 | 0 |
| EKVX-4 | | | | | | | [symbol] | 1480 | 43 [symbol] | 7 [symbol] | 22314 | 0 | 0 | 0 | 0 | 0 |
| EKVX-3 | | | | | | | [symbol] | 836 | 834 | 32907 | 12511 | 0 | 0 | 0 | 0 | 0 |
| EKVX-6 | | | | | | | [symbol] | 0 | 0 | 99902 | 1740 | 0 | 0 | 0 | 0 | 0 |
| EKVX-7 | | | | | | | [symbol] | 732 | 1374 | [symbol] 2 | 11042 | 0 | 0 | 0 | 0 | 0 |
| MCP-7-1 | | | | | | | wt | 240 | 718 | 88119 | 10 [symbol] | 0 | 0 | 0 | 0 | 0 |
| MCP-7-3 | | | | | | | wt | 407 | 6248 | [symbol] 380 | 7 [symbol] 3 | 0 | 0 | 0 | 0 | 0 |
| MCP-7-4 | | | | | | | wt | 438 | 1154 | 140711 | 14017 | 0 | 0 | 0 | 0 | 0 |
| MCP-7-6 | | | | | | | wt | 224 | 1050 | 81148 | 11019 | 0 | 0 | 0 | 0 | 0 |
| MCP-7-7 | | | | | | | wt | 0 | 1337 | 10847 | 8720 | 0 | 0 | 0 | 0 | 0 |
| AD [symbol] -RE [symbol] -1 | | | | | | | [symbol] | 0 | 3883 | 51125 | 1 [symbol] 444 | 0 | 0 | 0 | 0 | 0 |
| AD [symbol] -RE [symbol] -3 | | | | | | | [symbol] | 123 | 823 | 27134 | 8042 | 0 | 0 | 0 | 0 | 0 |
| AD [symbol] -RE [symbol] -4 | | | | | | | [symbol] | 0 | 941 | 15870 | 4440 | 0 | 0 | 0 | 0 | 0 |
| AD [symbol] -RE [symbol] -6 | | | | | | | [symbol] | 204 | 472 | 33538 | 7540 | 0 | 0 | 0 | 0 | 0 |
| AD [symbol] -RE [symbol] -7 | | | | | | | [symbol] | 980 | 7302 | 12023 | 13042 | 0 | 0 | 0 | 0 | 0 |
| WI 3 [symbol] -1 | | | | | | | wt | 819 | 0 | 41827 | 24007 | 0 | 0 | 0 | 0 | 0 |
| WI 3 [symbol] -3 | | | | | | | wt | 508 | 217 | 40570 | 15233 | 0 | 0 | 0 | 0 | 0 |
| WI 3 [symbol] -4 | | | | | | | wt | 642 | 751 | 32719 | 5317 | 0 | 0 | 0 | 0 | 0 |
| WI 3 [symbol] -6 | | | | | | | wt | 1161 | 3721 | 17081 | 11307 | 0 | 0 | 0 | 0 | 0 |
| WI 3 [symbol] -7 | | | | | | | wt | 218 | 4817 | 84181 | 12200 | 0 | 0 | 0 | 0 | 0 |
| H [symbol] L [symbol] -1 | | | | | | | HPY E [symbol] | 523 | 12821 | 18493 | 13319 | 0 | 0 | 0 | 0 | 0 |
| H [symbol] L [symbol] -3 | | | | | | | HPY E [symbol] | 480 | 643 | 51637 | 12033 | 0 | 0 | 0 | 0 | 0 |
| H [symbol] L [symbol] -4 | | | | | | | HPY E [symbol] | 502 | 3311 | 46288 | 7005 | 0 | 0 | 0 | 0 | 0 |
| H [symbol] L [symbol] -6 | | | | | | | HPY E [symbol] | 213 | 1104 | 40234 | 10027 | 0 | 0 | 0 | 0 | 0 |
| H [symbol] L [symbol] -7 | | | | | | | HPY E [symbol] | 0 | 1049 | 37504 | [symbol] | 0 | 0 | 0 | 0 | 0 |
| WI 2 [symbol] -1 | | | | | | | [symbol] | 944 | 0 | 88087 | 14773 | 0 | 0 | 0 | 0 | 0 |
| WI 2 [symbol] -3 | | | | | | | [symbol] | 304 | 0 | 80294 | 14722 | 0 | 0 | 0 | 0 | 0 |
| WI 2 [symbol] -4 | | | | | | | [symbol] | 304 | 2070 | 78198 | 29063 | 0 | 0 | 0 | 0 | 0 |
| WI 2 [symbol] -5 | | | | | | | [symbol] | 204 | 1404 | 33234 | 10427 | 0 | 0 | 0 | 0 | 0 |
| WI 2 [symbol] -7 | | | | | | | [symbol] | 440 | 0 | 41806 | 10304 | 0 | 0 | 0 | 0 | 0 |
| AS [symbol] -2 | | | | | | | wt | 194 | 4270 | 37307 | 1002 | 0 | 0 | 0 | 0 | 0 |
| EKVX-2 | | | | | | | [symbol] | 538 | 2003 | 23382 | 15428 | 0 | 0 | 0 | 0 | 0 |
| MCT-116-1 | | | | | | | wt | 428 | 8497 | 38339 | 9130 | 0 | 0 | 0 | 0 | 0 |
| MCT-116-2 | | | | | | | wt | 1123 | 3794 | 480330 | 21130 | 0 | 0 | 0 | 0 | 0 |
| MT [symbol] -2 | | | | | | | [symbol] | [symbol] 1 | 1380 | 62391 | 13827 | 0 | 0 | 0 | 0 | 0 |
| SP [symbol] -1 | | | | | | | wt | 0 | 1849 | 10007 | 13003 | 0 | 0 | 0 | 0 | 0 |
| SP [symbol] -2 | | | | | | | wt | 112 | 2474 | 46281 | 12141 | 0 | 0 | 0 | 0 | 0 |
| SP-268-1 | | | | | | | [symbol] | 962 | 317 | 42852 | 13334 | 0 | 0 | 0 | 0 | 0 |
| SP-268-2 | | | | | | | [symbol] | 818 | 850 | 74505 | 12530 | 0 | 0 | 0 | 0 | 0 |
| OVCAR- [symbol] -1 | | | | | | | wt | 332 | 98 | 70236 | 13104 | 0 | 0 | 0 | 0 | 0 |
| OVCAR- [symbol] -2 | | | | | | | wt | 342 | 1843 | 101777 | 10427 | 0 | 0 | 0 | 0 | 0 |
| OVCAR- [symbol] -1 | | | | | | | [symbol] | 220 | 941 | 12838 | 14287 | 0 | 0 | 0 | 0 | 0 |
| OVCAR- [symbol] -2 | | | | | | | [symbol] | 10 | 10 | 1110 | 6476 | 0 | 0 | 0 | 0 | 0 |
| MCF-7-2 | | | | | | | wt | 291 | 1423 | 11082 | 7 [symbol] 2 | 0 | 0 | 0 | 0 | 0 |
| AD [symbol] - [symbol] -2 | | | | | | | [symbol] | 0 | 731 | 31787 | [symbol] 442 | 0 | 0 | 0 | 0 | 0 |
| M [symbol] -2 | | | | | | | HPV E4 | 518 | 0 | 112434 | 14374 | 0 | 0 | 0 | 0 | 0 |
| SW [symbol] -1 | | | | | | | [symbol] | 328 | 0 | 54775 | 8 [symbol] | 0 | 0 | 0 | 0 | 0 |
| SW [symbol] -2 | | | | | | | [symbol] | 1061 | 7828 | 88139 | 12351 | 0 | 0 | 0 | 0 | 0 |
| WI2 [symbol] -2 | | | | | | | [symbol] | [symbol] 23 | 2573 | 57384 | 18061 | 0 | 0 | 0 | 0 | 0 |
| C33A-1 | | | | | | | [symbol] | [symbol] 02 | 18707 | 9547 | 18 [symbol] | 0 | 0 | 0 | 0 | 0 |
| C33A-2 | | | | | | | [symbol] | [symbol] 4 | 1154 | 43004 | 11722 | 0 | 0 | 0 | 0 | 0 |
| U2C [symbol] -1 | | | | | | | [symbol] | 110 | 86 | 151805 | 10077 | 0 | 0 | 0 | 0 | 0 |
| U2C [symbol] -2 | | | | | | | [symbol] | 121 | 0 | 140671 | 22177 | 0 | 0 | 0 | 0 | 0 |
| M [symbol] -1 | | | | | | | wt | 287 | 582 | 23 [symbol] 4 | 10011 | 0 | 0 | 0 | 0 | 0 |
| M [symbol] -2 | | | | | | | wt | [symbol] 0 | 985 | 34277 | 11870 | 0 | 0 | 0 | 0 | 0 |
| WI [symbol] -2 | | | | | | | wt | 415 | 2476 | 38744 | 25529 | 0 | 0 | 0 | 0 | 0 |
| M [symbol] -1 | | | | | | | | 574 | 283 | 1294 | 110430 | 0 | 0 | 0 | 0 | 0 |
| M [symbol] -2 | | | | | | | | 1123 | 3287 | 36129 | 1 [symbol] 56 | 0 | 0 | 0 | 0 | 0 |
| M [symbol] -3 | | | | | | | | [symbol] 4 | 894 | 34711 | 31829 | 0 | 0 | 0 | 0 | 0 |
| M [symbol] -4 | | | | | | | | 1168 | 0 | 12352 | 7 [symbol] | 0 | 0 | 0 | 0 | 0 |
| M [symbol] - [symbol] | | | | | | | | 730 | 0 | 8477 | 277577 | 0 | 0 | 0 | 0 | 0 |
| M [symbol] - [symbol] | | | | | | | | 872 | 8439 | 13002 | 31582 | 0 | 0 | 0 | 0 | 0 |
| M [symbol] - [symbol] | | | | | | | | 1350 | 1097 | 14384 | 24700 | 0 | 0 | 0 | 0 | 0 |
| M [symbol] - [symbol] | | | | | | | | 834 | 0 | 15325 | 11034 | 0 | 0 | 0 | 0 | 0 |
| [symbol] -7 | | | | | | | | 4281 | 4123 | [symbol] 781 | [symbol] 7 | 0 | 0 | 0 | 0 | 0 |
| [symbol] -4 | | | | | | | | 1603 | 0 | 1,28,244 | 31,888 | 0 | 0 | 0 | 0 | 0 |
| [symbol] -0 | | | | | | | | 1704 | 362 | 23,137 | 22, [symbol] | 0 | 0 | 0 | 0 | 0 |
| [symbol] -11 | | | | | | | | 2 [symbol] | 2718 | [symbol] | 36,367 | 0 | 0 | 0 | 0 | 0 |
| [symbol] -12 | | | | | | | | 1421 | 0 | 14,3018 | 14,764 | 0 | 0 | 0 | 0 | 0 |
| [symbol] -10 | | | | | | | | 1137 | 11437 | [symbol] ,778 | 2, [symbol] 13 | 0 | 0 | 0 | 0 | 0 |
| [symbol] -1 | | | | | | | | [symbol] | 0 | [symbol] | 87,121 | 0 | 0 | 0 | 0 | 0 |
| [symbol] -2 | | | | | | | | 778 | 282 | 11,3575 | 44,171 | 0 | 0 | 0 | 0 | 0 |
| [symbol] -3 | | | | | | | | [symbol] | [symbol] | 89,117 | [symbol] | 0 | 0 | 0 | 0 | 0 |
| [symbol] -4 | | | | | | | | 64 | 3575 | [symbol] | 11,740 | 0 | 0 | 0 | 0 | 0 |
| [symbol] -5 | | | | | | | | 647 | 217 | [symbol] | 34,175 | 0 | 0 | 0 | 0 | 0 |
| [symbol] -6 | | | | | | | | 1734 | 0 | 48,374 | 16,000 | 0 | 0 | 0 | 0 | 0 |
| A [symbol] -0 | | | | | | | wt | 147 | 1853 | 35,454 | 11,740 | 0 | 0 | 0 | 0 | 0 |
| EXVX-8 | | | | | | | [symbol] | 261 | [symbol] | 74,732 | 34,175 | 0 | 0 | 0 | 0 | 0 |
| HGT-118-7 | | | | | | | wt | 438 | 0 | 48,374 | 16,076 | 0 | 0 | 0 | 0 | 0 |
| HGT-118-8 | | | | | | | wt | 368 | 674 | [symbol] | [symbol] | 0 | 0 | 0 | 0 | 0 |
| HT25-1 | | | | | | | [symbol] | 273 | 3281 | 23,164 | 16,610 | 0 | 0 | 0 | 0 | 0 |
| XT25-1 | | | | | | | [symbol] | 78 | 3147 | [symbol] | 6481 | 0 | 0 | 0 | 0 | 0 |
| HT25-6 | | | | | | | [symbol] | 181 | 457 | 63,732 | 14,319 | 0 | 0 | 0 | 0 | 0 |
| SF [symbol] -7 | | | | | | | wt | 107 | 446 | 33,067 | 13,17 | 0 | 0 | 0 | 0 | 0 |
| SF538-8 | | | | | | | wt | 223 | 0 | 29,182 | 14,319 | 0 | 0 | 0 | 0 | 0 |
| SF266-7 | | | | | | | [symbol] | 881 | 1301 | 72,107 | 6447 | 0 | 0 | 0 | 0 | 0 |
| SF-366-6 | | | | | | | [symbol] | 1384 | 627 | 10,500 | 8738 | 0 | 0 | 0 | 0 | 0 |
| OVCAR-4-7 | | | | | | | wt | 0 | 320 | 12,000 | 13,175 | 0 | 0 | 0 | 0 | 0 |
| OVCAR-5-8 | | | | | | | [symbol] | 154 | 0 | 17,814 | 0041 | 0 | 0 | 0 | 0 | 0 |
| OVCAR-6-7 | | | | | | | [symbol] | 545 | 740 | 24,120 | 14,422 | 0 | 0 | 0 | 0 | 0 |
| OVCAR-6-8 | | | | | | | [symbol] | 422 | 3013 | 12,600 | 21,781 | 0 | 0 | 0 | 0 | 0 |
| MCF-7-8 | | | | | | | [symbol] | 0 | 2343 | 23,063 | 10,770 | 0 | 0 | 0 | 0 | 0 |
| [symbol] | | | | | | | [symbol] | 737 | 1041 | 24,571 | 10,657 | 0 | 0 | 0 | 0 | 0 |
| [symbol] | | | | | | | [symbol] | 224 | 7324 | 43,102 | 11,163 | 0 | 0 | 0 | 0 | 0 |
| SW489-7 | | | | | | | [symbol] | 102 | 2330 | [symbol] | 17,722 | 0 | 0 | 0 | 0 | 0 |
| SW489-8 | | | | | | | [symbol] | 372 | 2172 | 11,400 | 6104 | 0 | 0 | 0 | 0 | 0 |
| H1238-8 | | | | | | | [symbol] | 0 | 1613 | 28,317 | 12,001 | 0 | 0 | 0 | 0 | 0 |
| C33A-7 | | | | | | | [symbol] | 70 | 2184 | 72,532 | [symbol] | 0 | 0 | 0 | 0 | 0 |
| C33A-8 | | | | | | | [symbol] | 67 | 0 | 15,0,067 | 10,781 | 0 | 0 | 0 | 0 | 0 |
| U203-7 | | | | | | | wt | 538 | 4034 | 38,274 | 8774 | 0 | 0 | 0 | 0 | 0 |
| U308-8 | | | | | | | wt | 502 | 4457 | 8255 | 13,570 | 0 | 0 | 0 | 0 | 0 |
| [symbol] -7 | | | | | | | wt | 732 | 47 | [symbol] | 14,777 | 0 | 0 | 0 | 0 | 0 |
| [symbol] -8 | | | | | | | | 6548 | 0 | [symbol] | 10,004 | 0 | 0 | 0 | 0 | 0 |
| WI38-8 | | | | | | | | 110 | 0 | 8735 | 7518 | 0 | 0 | 0 | 0 | 0 |
| [symbol] | | | | | | 64 | | 341 | 1575 | [symbol] | 7421 | 15,778 | 21,839 | 3228 | 37 [symbol] | 7006 |
| CF2,1572, [symbol] | | | | | | | | 1340 | 405 | 87 [symbol] | 2767 | 887 | 2381 | 1237 | [symbol] | 2084 |
| [symbol] | | | | | | | | 457 | 516 | 1 [symbol] | [symbol] | 4834 | 12,083 | 23,343 | 21,752 | 2324 |
| HT388 | | | | | | | | 3175 | 0 | [symbol] | 24,204 | 4834 | 5347 | 715 | [symbol] | 7005 |
| HT345 | | | | | | | | 0 | 380 | [symbol] 198 | [symbol] 34 | 7363 | 15,311 | 725 | [symbol] | 5768 |
| HT675 | | | | | | | | 40 | 303 | 2532 | 2582 | 704 | 7809 | 2635 | [symbol] | 7837 |
| HT628 | | | | | | | | 01 | 420 | 8381 | 4229 | 183 | 2123 | 2338 | [symbol] | 2764 |
| [symbol] -3 | | | | | | 173 | | 325 | 0 | 14,405 | 12,819 | 1029 | 153 | 723 | 45,163 | [symbol] |
| [symbol] -6 | | | | | | 175 | | 1003 | 0 | [symbol] | 5200 | 859 | 1780 | 121 | [symbol] | 4314 |
| [symbol] -8 | | | | | | 177 | | 591 | 0 | 83 [symbol] | 5200 | 1536 | 1118 | 115 | [symbol] | [symbol] |
| [symbol] | | | | | | | | 138 | 0 | 14,405 | 12,819 | 1542 | 3275 | 1342 | [symbol] | 1011 |
| [symbol] 10 | | | | | | 237 | | 515 | 0 | [symbol] | [symbol] | 1666 | 1,8010 | 2231 | [symbol] | 14,731 |
| HT10 | | | | | | | | 384 | 37 | 2723 | 5219 | 263 | 3078 | 1114 | [symbol] | 8700 |
| [symbol] | | | | | | | | 405 | 0 | 2,00,879 | 11,083 | 1553 | 367 | 74 | 44,374 | 8400 |
| [symbol] | | | | | | | | 1201 | 0 | 29,774 | 11,028 | 2188 | 10, [symbol] | 1479 | 24,578 | 4500 |
| [symbol] | | | | | | | | 1883 | 354 | 75,223 | 17,508 | 3422 | 1$ | 1384 | 27,087 | 4355 |
| [symbol] | | | | | | | wt | 420 | 3054 | [symbol] | [symbol] | 3824 | 3415 | 2424 | 32,124 | 7705 |
| [symbol] | | | | | | | wt | 857 | 0 | 29,779 | [symbol] | 0 | 0 | 0 | 0 | 0 |
| HCT-176-3 | | | | | | | wt | 350 | 377 | 30,555 | 13,023 | 0 | 0 | 0 | 0 | 0 |
| HCT-116-4 | | | | | | | wt | 0 | 271 | [symbol] | [symbol] | 0 | 0 | 0 | 0 | 0 |
| HCT-116-5 | | | | | | | wt | 0 | 248 | 2330 | 7224 | 0 | 0 | 0 | 0 | 0 |
| HCT-116-6 | | | | | | | [symbol] | [symbol] | 4538 | 3330 | 7224 | 0 | 0 | 0 | 0 | 0 |
| AS [symbol] | | | | | | | [symbol] | 238 | 3771 | 3915 | 0 | 0 | 0 | 0 | 0 | 0 |
| NT29-3 | | | | | | | [symbol] | 27 | 0 | 62,803 | 8937 | 0 | 0 | 0 | 0 | 0 |
| NT29-3 | | | | | | | [symbol] | 448 | 0 | [symbol] | 8240 | 0 | 0 | 0 | 0 | 0 |
| NT29-4 | | | | | | | [symbol] | 329 | 1308 | 23,073 | 18,179 | 0 | 0 | 0 | 0 | 0 |
| NT29-5 | | | | | | | wt | 661 | 457 | 63,479 | [symbol] | 0 | 0 | 0 | 0 | 0 |
| NT29-6 | | | | | | | wt | 329 | 3832 | 64,009 | 44,924 | 0 | 0 | 0 | 0 | 0 |
| OVCAR-4-3 | | | | | | | wt | 0 | 522 | [symbol] | 8741 | 0 | 0 | 0 | 0 | 0 |
| OVCAR-4-4 | | | | | | | wt | 391 | 0 | 53,852 | 13,001 | 0 | 0 | 0 | 0 | 0 |
| OVCAR-4-5 | | | | | | | wt | 291 | 0 | 83 [symbol] | [symbol] | 0 | 0 | 0 | 0 | 0 |
| OVCAR-4-6 | | | | | | | wt | 404 | 617 | 27,709 | 14 [symbol] | 0 | 0 | 0 | 0 | 0 |
| SF [symbol] -3 | | | | | | | wt | 259 | 2513 | 53,162 | 9722 | 0 | 0 | 0 | 0 | 0 |
| SF [symbol] -4 | | | | | | | wt | 0 | 3084 | 44,663 | [symbol] | 0 | 0 | 0 | 0 | 0 |
| SF [symbol] -5 | | | | | | | [symbol] | 648 | 444 | 8763 | 7202 | 0 | 0 | 0 | 0 | 0 |
| SF [symbol] -6 | | | | | | | wt | 0 | 617 | 27,709 | 14 [symbol] | 0 | 0 | 0 | 0 | 0 |
| OVCAR-4-3 | | | | | | | [symbol] | 0 | 892 | 15,534 | 7377 | 0 | 0 | 0 | 0 | 0 |
| OVCAR-4-4 | | | | | | | [symbol] | 512 | 2112 | 90,711 | 12,219 | 0 | 0 | 0 | 0 | 0 |
| OVCAR-4-5 | | | | | | | [symbol] | [symbol] | [symbol] | 82,509 | [symbol] | 0 | 0 | 0 | 0 | 0 |
| OVCAR-5-6 | | | | | | | [symbol] | 215 | 0 | 82 [symbol] | [symbol] | 0 | 0 | 0 | 0 | 0 |
| WCF-7-0 | | | | | | | [symbol] | 711 | 254 | 21,094 | 11,567 | 0 | 0 | 0 | 0 | 0 |
| [symbol] -6 | | | | | | | [symbol] | 0 | 226 | 50,552 | 8767 | 0 | 0 | 0 | 0 | 0 |
| H1230-1 | | | | | | | [symbol] | 313 | 3044 | [symbol] | 17,055 | 0 | 0 | 0 | 0 | 0 |
| SW480-3 | | | | | | | [symbol] | 824 | 0 | [symbol] | 25,234 | 0 | 0 | 0 | 0 | 0 |
| SW480-4 | | | | | | | [symbol] | 84 | 240 | [symbol] | [symbol] | 0 | 0 | 0 | 0 | 0 |
| SW480-5 | | | | | | | [symbol] | 822 | 0 | 40 [symbol] | 21,184 | 0 | 0 | 0 | 0 | 0 |
| SW480-6 | | | | | | | [symbol] | 0 | 0 | 42,319 | 25,174 | 0 | 0 | 0 | 0 | 0 |
| C33A-3 | | | | | | | [symbol] | 858 | 211 | 77,746 | 11,233 | 0 | 0 | 0 | 0 | 0 |
| C33A-4 | | | | | | | [symbol] | 254 | 875 | [symbol] | [symbol] | 0 | 0 | 0 | 0 | 0 |
| C33A-5 | | | | | | | [symbol] | 428 | 0 | 9205 | 7527 | 0 | 0 | 0 | 0 | 0 |
| C33A-6 | | | | | | | [symbol] | 144 | 85 | 2,17,524 | 30,812 | 0 | 0 | 0 | 0 | 0 |
| [symbol] | | | | | | | [symbol] | 353 | 2141 | 1,45,783 | 12,529 | 0 | 0 | 0 | 0 | 0 |
| UQO3-3 | | | | | | | [symbol] | 367 | 1378 | 11,555 | 17,142 | 0 | 0 | 0 | 0 | 0 |
| UQO3-4 | | | | | | | [symbol] | 817 | 128 | 11,177 | 12,775 | 0 | 0 | 0 | 0 | 0 |
| UQO3-5 | | | | | | | [symbol] | 825 | 404 | [symbol] | [symbol] | 0 | 0 | 0 | 0 | 0 |
| UQO3-6 | | | | | | | [symbol] | 434 | 4041 | 57,189 | 18,944 | 0 | 0 | 0 | 0 | 0 |
| [symbol] | | | | | | | [symbol] | 25 | 4744 | [symbol] | [symbol] | 0 | 0 | 0 | 0 | 0 |
| [symbol] -3 | | | | | | | wt | 232 | 1334 | 57,073 | 17,844 | 0 | 0 | 0 | 0 | 0 |
| [symbol] -6 | | | | | | | wt | 1334 | 140 | [symbol] | 27,837 | 0 | 0 | 0 | 0 | 0 |
| SF-366-3 | | | | | | | wt | 1761 | 6402 | 18,667 | 21,304 | 0 | 0 | 0 | 0 | 0 |
| SF-366-4 | | | | | | | [symbol] | 1145 | 1850 | 30,421 | 12,423 | 0 | 0 | 0 | 0 | 0 |
| SF-366-5 | | | | | | | [symbol] | 821 | 1858 | 40,854 | 20,121 | 0 | 0 | 0 | 0 | 0 |
| SF-366-6 | | | | | | | [symbol] | 574 | 1530 | 1,27,423 | 12,423 | 0 | 0 | 0 | 0 | 0 |
| [symbol] -13 | | | | | | | [symbol] | 1771 | 1629 | 2,35,833 | [symbol] | 0 | 0 | 0 | 0 | 0 |
| [symbol] -29 | | | | | | | | 1817 | [symbol] | [symbol] | [symbol] | 0 | 0 | 0 | 0 | 0 |
| [symbol] -21 | | | | | | | | 1349 | 87 | 34,349 | 63,737 | 0 | 0 | 0 | 0 | 0 |
| [symbol] -22 | | | | | | | | 1779 | 2514 | 1,20,280 | 25,282 | 0 | 0 | 0 | 0 | 0 |
| OVCAR-4-6 | | | | | | | [symbol] | 1023 | 0 | 41,280 | 27,874 | 0 | 0 | 0 | 0 | 0 |
| [symbol] -10 | | | | | | | | 1347 | 15 | 79,144 | 73,812 | 0 | 0 | 0 | 0 | 0 |
| [symbol] -11 | | | | | | | | 613 | 0 | 14 [symbol] | 87,514 | 0 | 0 | 0 | 0 | 0 |
| [symbol] -12 | | | | | | | | 1081 | 0 | 1 [symbol] | 5 [symbol] | 0 | 0 | 0 | 0 | 0 |
| [symbol] -13 | | | | | | | | 2111 | 0 | 24 [symbol] | [symbol] | 0 | 0 | 0 | 0 | 0 |
| [symbol] -14 | | | | | | | | 2004 | 0 | 58,283 | [symbol] | 0 | 0 | 0 | 0 | 0 |
| [symbol] -15 | | | | | | | | 739 | 0 | 1,04,457 | 14,747 | 0 | 0 | 0 | 0 | 0 |
| [symbol] -16 | | | | | | | | 818 | 0 | 96,744 | 13,838 | 0 | 0 | 0 | 0 | 0 |
| [symbol] -17 | | | | | | | | 675 | 0 | 40,277 | 10,300 | 0 | 0 | 0 | 0 | 0 |
| [symbol] -18 | | | | | | | | 480 | 557 | 1,44,750 | 18,832 | 0 | 0 | 0 | 0 | 0 |
| [symbol] -19 | | | | | | | | 844 | 4 | 3,00,623 | [symbol] | 0 | 0 | 0 | 0 | 0 |
| adrenal gland | | 1 | | | | | | [symbol] | 1342 | 187782 | 8831 | [symbol] | [symbol] | [symbol] | [symbol] | 4309 |
| [symbol] | | 2 | | | | | | [symbol] | 1034 | [symbol] | 14301 | [symbol] | [symbol] | [symbol] | [symbol] | 2871 |
| [symbol] | | 3 | | | | | | [symbol] | 345 | 117700 | 11387 | 21823 | [symbol] | [symbol] | 0 | [symbol] |
| [symbol] | | 4 | | | | | | 34733 | 0 | [symbol] | [symbol] | 723 | [symbol] | [symbol] | [symbol] | 344 |
| [symbol] | | 5 | | | | | | [symbol] | [symbol] | [symbol] | 1470 | 829 | [symbol] | [symbol] | [symbol] | 2311 |
| [symbol] | | 6 | | | | | | [symbol] | 2034 | [symbol] | 1439 | 7237 | [symbol] | [symbol] | [symbol] | 1244 |
| [symbol] | | 7 | | | | | | [symbol] | 134 | [symbol] | 10723 | 2768 | [symbol] | [symbol] | [symbol] | 274 |
| [symbol] | | 8 | | | | | | [symbol] | 232 | [symbol] | [symbol] | 7314 | [symbol] | [symbol] | [symbol] | 3472 |
| [symbol] | | 9 | | | | | | 103271 | 0 | [symbol] | 22934 | 3834 | [symbol] | [symbol] | [symbol] | [symbol] |
| [symbol] | | 10 | | | | | | [symbol] | [symbol] | [symbol] | 1973 | 8434 | [symbol] | [symbol] | [symbol] | [symbol] |
| [symbol] | | 11 | | | | | | [symbol] | [symbol] | [symbol] | [symbol] | 12334 | [symbol] | [symbol] | [symbol] | 4617 |
| [symbol] | | 12 | | | | | | [symbol] | 1446 | [symbol] | [symbol] | 17732 | 1143 | [symbol] | 870 | [symbol] |
| [symbol] | | 13 | | | | | | [symbol] | 3183 | [symbol] | 11342 | 18732 | 3479 | [symbol] | 270 | 2730 |
| [symbol] | | 14 | | | | | | [symbol] | 0 | [symbol] | [symbol] | 18787 | 1000 | [symbol] | 0 | 233 |
| [symbol] | | 15 | | | | | | [symbol] | 1470 | [symbol] | 8127 | 18343 | 4170 | [symbol] | 1544 | 3495 |
| [symbol] | | 16 | | | | | | [symbol] | 171 | [symbol] | 8744 | 1837 | [symbol] | [symbol] | 2077 | 3017 |
| [symbol] | | 17 | | | | | | [symbol] | 0 | [symbol] | [symbol] | 4454 | 2345 | [symbol] | 1102 | 3134 |
| [symbol] | | 18 | | | | | | [symbol] | 1342 | [symbol] | 3431 | 14330 | 2831 | [symbol] | 532 | 1432 |
| [symbol] | | 19 | | | | | | [symbol] | [symbol] | [symbol] | [symbol] | 3332 | [symbol] | [symbol] | [symbol] | 1434 |
| [symbol] | | 20 | | | | | | [symbol] | 1315 | 53517 | 21224 | 5273 | [symbol] | [symbol] | 787 | 714 |
| [symbol] | | 21 | | | | | | [symbol] | [symbol] | [symbol] | 4474 | [symbol] | 1234 | [symbol] | 124 | 413 |
| [symbol] | | 22 | | | | | | [symbol] | 0 | [symbol] | [symbol] | 30444 | 4242 | 17845 | 0 | 822 |
| [symbol] | | 23 | | | | | | 37827 | 577 | [symbol] | [symbol] | [symbol] | [symbol] | [symbol] | 0 | [symbol] |
| [symbol] | | 24 | | | | | | [symbol] | [symbol] | [symbol] | [symbol] | [symbol] | [symbol] | 71833 | [symbol] | 331 |
| [symbol] | | 25 | | | | | | [symbol] | [symbol] | [symbol] | [symbol] | 12224 | 454 | [symbol] | [symbol] | 1333 |
| [symbol] | | 27 | | | | | | 85252 | 83 | [symbol] | [symbol] | [symbol] | 8770 | [symbol] | 1733 | 317 |
| [symbol] | | 28 | | | | 28 | | [symbol] | 0 | 3134 | [symbol] | 2437 | [symbol] | 0 | 724 | 0 |
| [symbol] | | 29 | | | | | | [symbol] | 642 | [symbol] | 1932 | 4819 | 824 | 37702 | 0 | 755 |
| [symbol] | | 30 | | | | 30 | | [symbol] | 0 | 3012 | [symbol] | 4347 | 344 | [symbol] | 0 | 0 |
| [symbol] | | 31 | | | | | | [symbol] | [symbol] | 144782 | 1222 | 30444 | 3321 | [symbol] | 402 | [symbol] |
| [symbol] | | 32 | | | | | | [symbol] | [symbol] | 21473 | 3421 | 0 | 3472 | 37045 | 387 | 0 |
| [symbol] | | 33 | | | | | | [symbol] | 354 | [symbol] | 1371 | 4733 | 1003 | [symbol] | [symbol] | 3431 |
| [symbol] | | 34 | | | | | | 81717 | 373 | [symbol] | 2920 | 113 | 540 | [symbol] | 342 | 0 |
| [symbol] | | 35 | | | | | | [symbol] | 0 | 0 | [symbol] | 13335 | 0 | [symbol] | 0 | [symbol] |
| [symbol] | | 36 | | | | | | [symbol] | 0 | 0 | [symbol] | [symbol] | 2110 | [symbol] | [symbol] | 0 |
| [symbol] | | 37 | | | | | | 30349 | 418 | [symbol] | 4134 | [symbol] | [symbol] | [symbol] | 812 | 0 |
| [symbol] | | 38 | | | | | | [symbol] | [symbol] | 0 | [symbol] | 9199 | 1004 | [symbol] | 847 | 256 |
| [symbol] | | 39 | | | | | | 47672 | 0 | 2918 | [symbol] | 1134 | 0 | [symbol] | 482 | 0 |
| [symbol] | | 40 | | | | | | 70722 | 0 | 0 | 3341 | [symbol] | [symbol] | [symbol] | 220 | 0 |
| [symbol] | | 41 | | | | | | 42181 | 143 | 0 | [symbol] | 4470 | [symbol] | [symbol] | 10 | 3041 |
| [symbol] | | 42 | | | | | | [symbol] | [symbol] | 0 | 6154 | 4109 | 205 | 1081 | [symbol] | 304 |
| [symbol] | | 43 | | | | | | 25172 | 40 | 827 | 1379 | 17131 | 0 | 1708 | 0 | 0 |
| [symbol] | | 44 | | | | | | [symbol] | 120 | 234 | [symbol] | 13874 | 402 | 3483 | 334 | 0 |
| [symbol] | | | | | [symbol] | | | [symbol] | 0 | 0 | [symbol] | 0 | 57 | 0 | 244 | 0 |
| [symbol] | | | | | [symbol] | | | 8249 | 77 | 0 | 244 | 333 | 347 | 337 | [symbol] | 0 |
| [symbol] | | | | | [symbol] | | | 16329 | 0 | 0 | 249 | 183 | 0 | [symbol] | 0 | 0 |
| [symbol] | | | | | 394 | 394 | | 82144 | [symbol] | 0 | 23733 | 6784 | 7222 | 8308 | 1400 | 12 |
| [symbol] | | | | | 354 | 354 | | [symbol] | [symbol] | 0 | [symbol] | 4027 | 1113 | 422 | 474 | 0 |
| [symbol] | | | | | 344 | | | 27729 | 0 | 0 | 238 | 839 | 90 | 0 | 0 | 71 |
| [symbol] | | | | | 342 | | | 31432 | 230 | 0 | 0 | 54 | 79 | 0 | 0 | 0 |
| [symbol] | | | | | 334 | 334 | | 71833 | 0 | 0 | [symbol] | 2500 | 61 | [symbol] | 113 | 0 |
| [symbol] | | | | | 333 | | | 30788 | 277 | 335 | [symbol] | 52857 | 253 | 347 | 0 | 0 |
| [symbol] | | | | | 330 | | | [symbol] | 237 | 0 | 700 | 41 | 0 | 223 | 54 | 0 |
| [symbol] | | | | | 329 | | | [symbol] | 0 | 8377 | 20506 | 12409 | 83 | 2748 | 1212 | 0 |
| [symbol] | | | | | 327 | | | [symbol] | 0 | [symbol] | 0 | 10838 | 364 | 302 | 1110 | 0 |
| [symbol] | | | | | [symbol] | | | [symbol] | 0 | [symbol] | 42378 | 241101 | 721 | 780 | 524 | [symbol] |
| [symbol] | | | | | 321 | | | 41371 | 416 | 0 | 0 | 0 | 43 | [symbol] | 338 | 0 |
| [symbol] | | | | | 320 | | | [symbol] | 0 | 14728 | 4706 | [symbol] | 225 | [symbol] | 232 | 0 |
| [symbol] | | | | | 319 | | | [symbol] | 644 | 2041 | [symbol] | 300533 | [symbol] | 4242 | 1207 | [symbol] |
| [symbol] | | | | | 318 | | | [symbol] | 574 | 0 | [symbol] | [symbol] | [symbol] | 2740 | 403 | 440 |
| [symbol] | | | | | 314 | | | [symbol] | 0 | [symbol] | [symbol] | [symbol] | 1208 | [symbol] | 0 | [symbol] |
| [symbol] | | | | | 311 | | | [symbol] | 0 | 0 | [symbol] | 30382 | 1948 | 547 | 0 | 0 |
| [symbol] | | | | | 309 | | | [symbol] | [symbol] | 0 | [symbol] | 25475 | [symbol] | [symbol] | 134 | 0 |
| [symbol] | | | | | 307 | | | [symbol] | 118 | 0 | [symbol] | 18211 | [symbol] | [symbol] | [symbol] | 157 |
| [symbol] | | | | | [symbol] | | | 44817 | 0 | 0 | 831 | [symbol] | 1321 | 520 | 124 | [symbol] |
| [symbol] | | | | | [symbol] | | | [symbol] | 1164 | 0 | 8442 | [symbol] | 7874 | [symbol] | 223 | 0 |
| [symbol] | | | | | [symbol] | | | 72421 | [symbol] | 3702 | 8772 | [symbol] | [symbol] | 4725 | [symbol] | [symbol] |
| [symbol] | | | | | 299 | | | [symbol] | 444 | 0 | 35622 | [symbol] | 8342 | [symbol] | 1714 | 0 |
| [symbol] | | | | | 297 | | | [symbol] | 0 | 1047 | 34177 | [symbol] | [symbol] | 3674 | [symbol] | 51 |
| [symbol] | | | | | 298 | | | [symbol] | 0 | 138 | 2172 | [symbol] | [symbol] | 504 | 0 | 0 |
| [symbol] | | | | | 294 | | | [symbol] | [symbol] | 0 | 23722 | 38430 | 3182 | 1843 | 1180 | 134 |
| [symbol] | | | | | 292 | | | [symbol] | 36 | 0 | [symbol] | [symbol] | 8303 | [symbol] | 0 | 133 |
| [symbol] | | | | | 290 | | | [symbol] | 0 | [symbol] | [symbol] | 83231 | [symbol] | 2424 | 425 | [symbol] |
| [symbol] | | | | | 279 | | | [symbol] | 27 | 0 | 0 | 27722 | [symbol] | 0 | 0 | 0 |
| [symbol] | | | | | 277 | | | [symbol] | 27 | 0 | 2305 | [symbol] | [symbol] | 0 | 0 | 365 |
| [symbol] | | | | | 273 | 273 | | [symbol] | 0 | 0 | 0 | 1157 | 0 | 432 | 0 | 0 |
| [symbol] | | | | | [symbol] | | | [symbol] | 304 | 0 | 0 | 20354 | 0 | 141 | 804 | 0 |
| [symbol] | | | | | [symbol] | | | [symbol] | 0 | 1370 | 0 | 3833 | 0 | 304 | 0 | 405 |
| [symbol] | | | | | [symbol] | [symbol] | | 73347 | 1164 | 0 | 1100 | [symbol] | [symbol] | 14 | 218 | 144 |
| [symbol] | | | | | 235 | 235 | | [symbol] | [symbol] | 828 | 100 | 2281 | 857 | 0 | 0 | 0 |
| [symbol] | | | | | 234 | | | 78287 | 0 | 1108 | 2007 | 13754 | 0 | 0 | 0 | 0 |
| [symbol] | | | | | 233 | 233 | | [symbol] | 374 | 0 | 1052 | 1379 | 784 | 0 | 501 | 0 |
| [symbol] | | | | | 231 | 231 | | 62712 | 0 | 307 | 0 | 1571 | 1227 | 0 | 73 | [symbol] |
| [symbol] | | | | | 229 | 229 | | [symbol] | 0 | 581 | 2192 | 2318 | [symbol] | 0 | 574 | 0 |
| [symbol] | | | | | 227 | 227 | | [symbol] | 0 | 0 | 783 | 1830 | 842 | 0 | 0 | 0 |
| [symbol] | | | | | 222 | | | 33431 | 305 | 0 | [symbol] | [symbol] | 87 | 0 | 54 | 0 |
| [symbol] | | | | | 215 | | | [symbol] | 0 | 228 | 744 | [symbol] | 0 | 0 | 130 | 0 |
| [symbol] | | | | | 214 | | | [symbol] | 0 | [symbol] | [symbol] | 52831 | 2007 | 323 | 679 | 0 |
| [symbol] | | | | | 213 | | | [symbol] | 483 | 0 | 2249 | 743 | 43 | 334 | 131 | 0 |
| [symbol] | | | | | 212 | | | [symbol] | 0 | 0 | 0 | 11411 | [symbol] | 0 | 347 | 0 |
| [symbol] | | | | | 211 | 211 | | 34737 | 290 | 34 | [symbol] | 0 | 0 | 0 | 0 | 43 |
| [symbol] | | | | | 210 | | | 70127 | 0 | 0 | 23 | [symbol] | [symbol] | 0 | 443 | 0 |
| [symbol] | | | | | 209 | | | [symbol] | 155 | 67 | [symbol] | 2433 | [symbol] | 1106 | 0 | 0 |
| [symbol] | | | | | 208 | | | [symbol] | 0 | 0 | [symbol] | 7304 | [symbol] | 222 | [symbol] | 120 |
| [symbol] | | | | | [symbol] | | | [symbol] | 0 | 0 | 962 | 34 | 0 | 0 | 323 | 204 |
| [symbol] | | | | | 201 | | | 33307 | 0 | [symbol] | 0 | [symbol] | 0 | 545 | 0 | 0 |
| [symbol] | | | | | 199 | | | [symbol] | 0 | 0 | 179 | [symbol] | 0 | 0 | 0 | 0 |
| [symbol] | | | | | 197 | | | [symbol] | 0 | 8020 | [symbol] | [symbol] | 0 | [symbol] | 53 | 0 |
| [symbol] | | | | | [symbol] | | | 21318 | [symbol] | [symbol] | 1721 | 379 | [symbol] | 34 | 186 | 0 |
| [symbol] | | | | | [symbol] | | | 23113 | [symbol] | 0 | 14220 | [symbol] | 8113 | 792 | 505 | 0 |
| [symbol] | | | | | [symbol] | | | [symbol] | 0 | 0 | 0 | [symbol] | 0 | [symbol] | 0 | 0 |
| [symbol] | | | | | [symbol] | | | [symbol] | 0 | 0 | 231 | [symbol] | 3067 | 218 | 83 | 0 |
| [symbol] | | | | | 19 | | | [symbol] | [symbol] | 0 | 2734 | [symbol] | 7184 | 840 | 454 | 0 |
| [symbol] | | | | | 17 | | | [symbol] | 0 | 0 | 0 | 7921 | [symbol] | 449 | 134 | 347 |
| [symbol] | | | | | 14 | | | 37903 | 0 | [symbol] | [symbol] | [symbol] | 436 | 0 | 0 | 0 |
| [symbol] | | | | | 13 | | | 12835 | 0 | 0 | 778 | 7737 | 223 | 82 | 0 | 0 |
| [symbol] | | | | | 11 | | | 21541 | [symbol] | 0 | 342 | 7518 | [symbol] | 149 | 0 | 0 |
| [symbol] | | | | | 10 | | | 31744 | 244 | 37 | 341 | [symbol] | 154 | 141 | [symbol] | [symbol] |
| [symbol] | | | | 79 | | | | [symbol] | 134 | 0 | 144 | 0 | 600 | 507 | 419 | 0 |
| [symbol] | | | | 81 | | | | 17302 | 0 | 0 | 78 | 462 | [symbol] | [symbol] | 0 | 0 |
| [symbol] | | | | 83 | | | | 63322 | 0 | 0 | 0 | 0 | [symbol] | 0 | 714 | 0 |
| [symbol] | | | | 84 | | | | 28774 | [symbol] | 0 | 1042 | 0 | 827 | [symbol] | 0 | 0 |
| [symbol] | | | | 89 | | | | [symbol] | 0 | 0 | 3037 | 804 | 231 | [symbol] | 185 | 0 |
| [symbol] | | | | 90 | | | | [symbol] | 0 | 0 | [symbol] | 1347 | 1187 | 385 | 1438 | 0 |
| [symbol] | | | | 92 | | | | 52833 | 0 | 0 | 0 | 1254 | [symbol] | 0 | 185 | 0 |
| [symbol] | | | | 94 | | | | 43442 | 0 | 0 | 0 | 836 | [symbol] | [symbol] | 0 | 0 |
| [symbol] | | | | 99 | | | | 34824 | [symbol] | 0 | 0 | [symbol] | [symbol] | 0 | 313 | 0 |
| [symbol] | | | | 100 | | | | 15800 | 147 | 0 | 0 | [symbol] | 3313 | [symbol] | [symbol] | 189 |
| [symbol] | | | | 144 | | | | 22032 | 0 | 1157 | 0 | 718 | 1753 | 401401 | 87 | 282 |
| [symbol] | | | | 150 | | | | [symbol] | 72 | 0 | 0 | 539 | 701 | 00 | 183 | 357 |
| [symbol] | | | | 152 | | | | 17275 | 0 | 211 | 241 | 384 | 3481 | 545 | 0 | 57 |
| [symbol] | | | | 154 | | | | 14225 | 0 | 795 | 0 | 11 | [symbol] | 114114 | [symbol] | 178 |
| [symbol] | | | | 154 | | | | 8334 | 0 | [symbol] | 232 | 154 | [symbol] | 00 | 0 | 0 |
| [symbol] | | | | 154 | | | | [symbol] | 114 | 0 | 107 | 110 | [symbol] | 2424 | 143 | 141 |
| [symbol] | | | | 160 | | | | [symbol] | 350 | 0 | 234 | 409 | [symbol] | 00 | 20 | 0 |
| [symbol] | | | | 162 | | | | 14306 | 123 | 0 | [symbol] | 317 | [symbol] | 201 | 0 | 778 |
| [symbol] | | | | 164 | | | | 13034 | 0 | 231 | 370 | 422 | [symbol] | 0 | 670 | 0 |
| [symbol] | | | | [symbol] | | | | [symbol] 41 | 1 | 9 | 177 | [symbol] 71 | 4172 | 0 | 0 | 0 |
| [symbol] | | | | 1 [symbol] | | | | [symbol] 23 | 1415 | 0 | [symbol] | [symbol] | 5374 | 100 | 0 | [symbol] |
| [symbol] | | | | 1 [symbol] | | | | [symbol] | [symbol] | [symbol] | 438 | 731 | 1318 | 1100 | 0 | 124 |
| [symbol] | | | | 1 [symbol] | | | | [symbol] 45 | 47 | [symbol] 22 | [symbol] | 0 | [symbol] | 0 | 0 | 0 |
| [symbol] | | | | 1 [symbol] | | | | 11 [symbol] | [symbol] | 210 | 1871 | 247 | 334 | 32 | 187 | 176 |
| [symbol] | | | | 171 | | | | [symbol] | 0 | [symbol] | 0 | 0 | 0 | [symbol] 1 | 120 | 126 |
| [symbol] | | | | 187 | | | | [symbol] | 0 | 0 | [symbol] | 3000 | 1000 | [symbol] | 0 | 0 |
| [symbol] | | | | 1 [symbol] | | | | [symbol] | 0 | 0 | 1154 | 3112 | 1 [symbol] 2 | 141 | 06 | 30 |
| [symbol] | | | | 200 | | | | [symbol] | 130 | 0 | [symbol] | 523 | 174 | 750 | 371 | 130 |
| [symbol] | | | | 202 | | | | [symbol] | 7143 | 1474 | [symbol] | [symbol] | [symbol] | 0 | [symbol] | 0 |
| [symbol] | | | | 206 | | | | [symbol] | 0 | [symbol] | 714 | [symbol] | 211 | 174 | 0 | 433 |
| [symbol] | | | | 274 | | | | [symbol] | 0 | 0 | 1234 | 572 | 143 | 0 | [symbol] | 0 |
| [symbol] | | | | 220 | | | | [symbol] | 0 | 0 | 14 | 0 | 02 | 0 | 330 | 0 |
| [symbol] | | | | 220 | | | | [symbol] | 0 | 0 | 3 [symbol] | 140 [symbol] | 411 | 0 | 411 | 0 |
| [symbol] | | | | 221 | | | | [symbol] | 0 | [symbol] 41 | 0 | 831 | 47 | 0 | [symbol] | 0 |
| [symbol] | | | | 270 | | | | [symbol] | 0 | [symbol] | 0 | 3727 | 0 | [symbol] | 174 | 134 |
| [symbol] | | | | 223 | | | | [symbol] | 0 | 0 | 0 | 0 | [symbol] | [symbol] | 0 | 0 |
| [symbol] | | | | 2 [symbol] | | | | [symbol] | 04 | 123 | [symbol] | [symbol] | 447 | 1 [symbol] 7 | 2 [symbol] 1 | 0 |
| [symbol] | | | | 221 | | | | [symbol] | 00 | 0 | 223 | 0 | 236 | 0 | 0 | 0 |
| [symbol] | | | | 2 [symbol] | | | | [symbol] | 43 | 0 | 134 | 0 | 23 | 0 | [symbol] | 0 |
| [symbol] | | | | 241 | | | | [symbol] | 0 | [symbol] | [symbol] | 724 | 140 | [symbol] | 0 | 0 |
| [symbol] | | | | 242 | | | | [symbol] | 0 | 0 | 142 | 22 | [symbol] | [symbol] | 0 | [symbol] |
| [symbol] | | | | 243 | | | | [symbol] | 367 | 13343 | 1834 | [symbol] | [symbol] | 371 | 0 | 0 |
| [symbol] | | | | 244 | | | | [symbol] | 0 | 200 | 0 | 0 | 4241 | 2403 | 0 | 0 |
| [symbol] | | | | 246 | | | | [symbol] | 100 | 0 | [symbol] | 307 | 360 | 1115 | 1154 | 1434 |
| [symbol] | | | | 248 | | | | [symbol] | 0 | 901 | 300 | [symbol] | [symbol] | 134 | 232 | [symbol] |
| [symbol] | | | | 250 | | | | [symbol] | 0 | 0 | [symbol] | 0 | 0 | 153 | [symbol] 12 | [symbol] |
| [symbol] | | | | 251 | | | | [symbol] | 0 | 0 | 0 | 354 | 723 | 0 | 007 | [symbol] |
| [symbol] | | | | 248 | | | | [symbol] | 1251 | 1251 | [symbol] | 152 | 1417 | 304 | [symbol] | 200 |
| [symbol] | | | | 240 | | | | [symbol] | 0 | 200 | 813 | 1004 | 2385 | 1074 | [symbol] | 0 |
| [symbol] | | | | 250 | | | | [symbol] | 0 | 1077 | 0 | 137 | 547 | 0 | 714 | 0 |
| [symbol] | | | | 251 | | | | [symbol] | 470 | 415 | 0 | 342 | 757 | 0 | 0 | 115 |
| [symbol] | | | | 262 | | | | [symbol] | 0 | 3782 | 1157 | 304 | [symbol] | 835 | 1034 | 271 |
| [symbol] | | | | 253 | | | | [symbol] | 0 | 3782 | 0 | 204 | 483 | 0 | 0 | 0 |
| [symbol] | | | | 254 | | | | [symbol] | 119 | [symbol] | [symbol] | 512 | 215 | 472 | 104 | 0 |
| [symbol] | | | | 256 | | | | [symbol] | [symbol] | [symbol] | 0 | 754 | [symbol] 133 | 0 | 270 | [symbol] |
| [symbol] | | | | 257 | | | | [symbol] | 120 | 573 | 740 | 373 | 1340 | 300 | 231 | [symbol] |
| [symbol] | | | | 258 | | | | [symbol] | 737 | [symbol] | 1917 | 0 | 235 | 377 | 73 | 0 |
| [symbol] | | | | 254 | | | | [symbol] | [symbol] 7 | [symbol] | 0 | 312 | [symbol] | 0 | 157 | 118 |
| [symbol] | | | | 300 | | | | [symbol] | [symbol] | [symbol] | 0 | 141 | 338 | 0 | [symbol] | 0 |
| [symbol] | | | | 301 | | | | [symbol] | 212 | 299 | 324 | [symbol] | 3 [symbol] | 0 | [symbol] | [symbol] |
| [symbol] | | | | 342 | | | | [symbol] | 0 | 0 | 617 | 1130 | [symbol] | 0 | 454 | 0 |
| [symbol] | | | | 343 | | | | [symbol] | [symbol] | 506 | [symbol] | 0 | [symbol] | [symbol] | [symbol] | [symbol] |
| [symbol] | | | | 343 | | | | [symbol] | [symbol] | 504 | [symbol] | 319 | 517 | [symbol] | 012 | 0 |
| [symbol] | | | | 3 [symbol] | | | | [symbol] | [symbol] | [symbol] | 0 | 170 | 34 | 279 | 0 | 0 |
| [symbol] | | | | 248 | | | | [symbol] | 0 | 1771 | [symbol] | 407 | 1109 | 2554 | 448 | 563 |
| [symbol] | | | | 247 | | | | [symbol] | 0 | 237 | 815 | 40 | 203 | 5 | 0 | 0 |
| [symbol] | | | | [symbol] | | | | [symbol] | 0 | 0 | [symbol] | 7537 | 0 | 418 | 3472 | 278 |
| [symbol] | | | | [symbol] | | | | [symbol] | 0 | 0 | 0 | 0 | 492 | 2743 | 424 | 424 |
| [symbol] | | | | 273 | | | | [symbol] | 727 | 2443 | 0 | 022 | [symbol] | [symbol] | [symbol] | 0 |
| Y | | | | [symbol] | | | | [symbol] | [symbol] | [symbol] | [symbol] | 8283 | 4347 | 1471 | 0 | [symbol] |
| K | | | | [symbol] | | | | [symbol] | 44 | 0 | 350 | [symbol] | 0 | 311 | 307 | 0 |
| H | | | | 273 | | | | [symbol] | 00 | 7043 | 0 | 0 | 31 | [symbol] | 42 | 0 |
| H | | | | 273 | | | | [symbol] | [symbol] | 2300 | [symbol] | 17200 | 27 [symbol] | 1120 | 103 | 0 |
| H | | | | 323 | | | | [symbol] | [symbol] | 0 | 205 | [symbol] | 0 | 1267 | 12 | 0 |
| [symbol] | | | | 324 | | | | [symbol] | 0 | 0 | [symbol] | 2011 | 0 | 640 | [symbol] | 0 |
| [symbol] | | | | [symbol] | | | | [symbol] | 0 | 0 | 757 | 0 | 334 | [symbol] | 221 | 0 |
| [symbol] | | | | [symbol] | | | | [symbol] | 0 | 0 | [symbol] | 1027 | [symbol] | 1832 | 231 | 0 |
| [symbol] | | | | [symbol] | | | | [symbol] | 0 | 767 | 45452 | 11547 | [symbol] | 1451 | [symbol] | [symbol] |
| [symbol] | | | | [symbol] | | | | [symbol] | 17 | 0 | 13847 | [symbol] | [symbol] | 10227 | 1871 | [symbol] |
| U | | | | 341 | | | | [symbol] | 134 | 154 | 0 | 0 | 1433 | 0 | 0 | [symbol] |
| [symbol] | | | | 342 | | | | [symbol] | 0 | 167 | [symbol] | [symbol] | [symbol] | [symbol] | 0 | [symbol] |
| P [symbol] | | | | 343 | | | | [symbol] | 0 | 2043 | 1731 | 174 | [symbol] | [symbol] | 29 | 422 |
| HCC [symbol] | | | | 3 [symbol] | | | | 177 [symbol] | 0 | [symbol] | 1731 | 774 | [symbol] | [symbol] 73 | 29 | 4 [symbol] |
| [symbol] | | | | 345 | | | | 16302 | 0 | [symbol] | 13 [symbol] | [symbol] | 2 [symbol] | 4 [symbol] | 1234 | [symbol] |
| HT192 | | | | 3 [symbol] | | | | 4 [symbol] | [symbol] 7 | [symbol] | 2 [symbol] 71 | 17 [symbol] | [symbol] | 14 [symbol] | 0 | [symbol] |
| COLO 205 | | | | 247 | | | | 12549 | 0 | 0 | 23 [symbol] | 0 | 109 | 0 | 757 | [symbol] |
| HT210 | | | | 345 | | | | 2 [symbol] 25 | 0 | 0 | 3 [symbol] | [symbol] 440 | [symbol] | 0 | 9 | 0 |
| [symbol] 72 | | | | 349 | | | | 21 [symbol] | 0 | 7 [symbol] | 217 [symbol] | 77 [symbol] | 2 [symbol] | 0 | [symbol] 31 | [symbol] |
| HT [symbol] 91 | | | | 350 | | | | [symbol] | [symbol] | [symbol] 70 | [symbol] 32 | [symbol] 52 | 43 | [symbol] | 511 | 27 [symbol] |
| [symbol] | | | | 351 | | | | 23 [symbol] | 0 | [symbol] | [symbol] 15 | 0 | 152 | [symbol] 50 | [symbol] | 0 |
| HT [symbol] | | | | 352 | | | | [symbol] 25 | 4 [symbol] | 0 | [symbol] | 19 [symbol] | 20 [symbol] | 0 | 0 | 0 |
| [symbol] | | | | 353 | | | | 23 [symbol] | 0 | 0 | 1917 | 237 | 205 [symbol] | 212 | 43 [symbol] | 0 |
| T [symbol] | | | | 3 [symbol] | | | | 42 [symbol] | 204 | [symbol] | 22002 | 5342 | [symbol] | 2400 | 23 | [symbol] 78 |
| [symbol] | | | | 357 | | | | 74434 | [symbol] 51 | [symbol] 7 | 7 [symbol] | 110 [symbol] | 3122 [symbol] | [symbol] 343 | 17 [symbol] | 27 [symbol] |
| [symbol] T | | | | 35 [symbol] | | | | 23715 | 71 | 2397 | 15 [symbol] | [symbol] | 141 [symbol] | 42 [symbol] | 372 | 0 |
| HT213 | | | 50 | | | | | 41730 | 0 | [symbol] | [symbol] | 12170 | 2 [symbol] | 0 | 0 | 0 |
| HT [symbol] | | | 52 | | | | | [symbol] 14 | [symbol] | 0 | [symbol] 90 | 3 [symbol] | 2 [symbol] | [symbol] | 0 | 0 |
| HT [symbol] | | | 54 | | | | | 27801 | 504 | 2 [symbol] | 1 [symbol] | 0 | 0 | 104 | 5 [symbol] | 143 |
| HT [symbol] | | | 5 [symbol] | | | | | 377 [symbol] 0 | 0 | 0 | 7 [symbol] | 12374 | 2 [symbol] | 9 | [symbol] | [symbol] |
| HT [symbol] | | | [symbol] | | | | | [symbol] 17 | 0 | 0 | 354 | [symbol] 4 | 0 | [symbol] | 141 | 0 |
| HT170 | | | [symbol] | | | | | [symbol] | 7 [symbol] | 0 | 73 [symbol] | 5 [symbol] | [symbol] 7 | [symbol] 07 | [symbol] 20 | 0 |
| HT172 | | | 62 | | | | | 313 [symbol] | [symbol] | 0 | [symbol] 71 | 3457 | 0 | 0 | [symbol] 34 | 357 |
| HT13 [symbol] | | | 63 | | | | | 41 [symbol] | 0 | 245 | 0 | 170 [symbol] | 0 | 171 | 0 | 0 |
| HT17 [symbol] | | | 64 | | | | | 37107 | 0 | 0 | 2 [symbol] | 1 [symbol] | 7 [symbol] | 0 | 443 | 45 |
| HT [symbol] | | | 65 | | | | | 32270 | 0 | 0 | 0 | 1173 [symbol] | 0 | [symbol] | 0 | 1 [symbol] |
| HT [symbol] | | | 57 | | | | | 24571 | [symbol] | 0 | [symbol] | 3 [symbol] | [symbol] | 73 | [symbol] | 27 |
| HT [symbol] | | | 57 | | | | | [symbol] | 0 | 0 | [symbol] | 1182 | [symbol] | 0 | [symbol] | 0 |
| HT [symbol] | | | 54 | | | | | [symbol] | 247 | 0 | [symbol] | 25 | [symbol] | 725 | [symbol] | 0 |
| HT143 | | | [symbol] | | | | | [symbol] | 0 | 475 | [symbol] | 0 | 0 | 0 | 0 | 247 |
| HT [symbol] | | | 70 | | | | | [symbol] | 135 | 0 | 435 | 5171 | 0 | 0 | [symbol] | 19 |
| HT [symbol] | | | 71 | | | | | 27515 | [symbol] | 0 | 7547 | [symbol] | 0 | 0 | 231 | [symbol] |
| HT [symbol] | | | 72 | | | | | [symbol] | 0 | 0 | [symbol] | [symbol] | 423 | 0 | [symbol] | 31 |
| HT302 | | | 73 | | | | | [symbol] | 0 | 0 | [symbol] | [symbol] | [symbol] | 0 | [symbol] | 0 |
| HT314 | | | 74 | | | | | [symbol] | 475 | 0 | 131 | [symbol] | [symbol] | 0 | 0 | 0 |
| HT317 | | | 76 | | | | | [symbol] | [symbol] | 0 | [symbol] | [symbol] | [symbol] | 0 | [symbol] | 0 |
| [symbol] | | | 77 | | | | | [symbol] | 0 | 0 | 142 | [symbol] | 0 | [symbol] | 0 | 0 |
| HT323 | | | 79 | | | | | [symbol] | [symbol] | 534 | 0 | 12917 | [symbol] | 0 | 0 | 0 |
| HT327 | | | 80 | | | | | [symbol] | [symbol] | 0 | 7 [symbol] | [symbol] | [symbol] | [symbol] | [symbol] | 0 |
| HT [symbol] | | | 82 | | | | | [symbol] | 0 | 017 [symbol] | 0 | [symbol] | [symbol] | [symbol] | [symbol] | [symbol] |
| HT [symbol] | | | 85 | | | | | [symbol] | 209 | 0 | 0 | [symbol] | 0 | 103 | [symbol] | [symbol] |
| HT343 | | | 87 | | | | | [symbol] | [symbol] | 0 | [symbol] | [symbol] | 0 | 126 | [symbol] | [symbol] |
| HT311 | | | 170 | | | | | [symbol] | [symbol] | 0 | 454 | [symbol] | [symbol] | 0 | 0 | 114 |
| HT [symbol] | | | 183 | | | | | [symbol] | 0 | 0 | 0 | 4527 | [symbol] | [symbol] | [symbol] | 0 |
| HT540 | | | [symbol] | | | | | [symbol] | 0 | 0 | 0 | [symbol] | 0 | 0 | [symbol] | [symbol] |
| HT251 | | | [symbol] | | | | | [symbol] | 0 | 0 | 0 | [symbol] | [symbol] | 0 | [symbol] | 0 |
| HT372 | | | 191 | | | | | 43132 | 0 | 0 | [symbol] | [symbol] | [symbol] | 0 | [symbol] | [symbol] |
| [symbol] | | | 20 [symbol] | | | | | 34117 | 0 | 154 | 1 | 0 | 0 | 0 | 0 | [symbol] |
| HT [symbol] | | | 21 [symbol] | | | | | [symbol] | 205 | 2 [symbol] | 1107 | [symbol] | 0 | 0 | 344 | 0 |
| HT207 | | | 217 | | | | | 174 [symbol] | 54 | 0 | 252 | [symbol] | [symbol] | 0 | 0 | 142 |
| HT [symbol] | | | 224 | | | | | [symbol] | 0 | 0 | [symbol] | [symbol] | [symbol] | [symbol] | 0 | [symbol] |
| HT379 | | | 225 | | | | | [symbol] | 0 | 0 | [symbol] | [symbol] | 0 | 0 | 0 | 0 |
| HT371 | | | 27 [symbol] | | | | | [symbol] | 0 | 1 | 0 | [symbol] | 254 | 2 | [symbol] | [symbol] |
| HT377 | | | 2 [symbol] | | | | | [symbol] | 423 | [symbol] | 0 | [symbol] | 0 | 0 | [symbol] | 0 |
| HT342 | | | [symbol] | | | | | [symbol] | 0 | 0 | [symbol] | [symbol] | 0 | 327 | 427 | 0 |
| [symbol] | | | [symbol] | | | | | [symbol] | [symbol] | 0 | 0 | [symbol] | 0 | 0 | 0 | 0 |
| HT334 | | | [symbol] | | | | | [symbol] | [symbol] | 0 | [symbol] | [symbol] | 0 | 0 | 0 | 0 |
| HT [symbol] | | | 301 | | | | | [symbol] | [symbol] | 0 | [symbol] | [symbol] | 145 | [symbol] | 221 | 0 |
| HT [symbol] | | | 3 [symbol] | | | | | [symbol] | 253 | 0 | [symbol] | [symbol] | 0 | [symbol] | 0 | 0 |
| HT [symbol] | | | 317 | | | | | [symbol] | 449 | 115 | [symbol] | [symbol] | 0 | [symbol] | 754 | [symbol] |
| HT312 | | | 318 | | | | | [symbol] | 0 | 0 | [symbol] | [symbol] | [symbol] | [symbol] | 379 | 0 |
| HT [symbol] | | | 224 | | | | | [symbol] | 0 | 522 | [symbol] | 0 | [symbol] | [symbol] | [symbol] | 0 |
| HT [symbol] | | | [symbol] | | | | | [symbol] | [symbol] | 0 | [symbol] | [symbol] | 0 | [symbol] | [symbol] | 0 |
| HT [symbol] | | | 3 [symbol] | | | | | 57 [symbol] | 0 | 0 | [symbol] | [symbol] | [symbol] | 233 | [symbol] | 0 |
| HT [symbol] | [symbol] | | | | | | | 28111 | 54 | [symbol] | [symbol] | [symbol] | 91 | [symbol] | [symbol] | 0 |
| HT [symbol] | 1 [symbol] 1 | | | | | | | [symbol] | 0 | [symbol] | [symbol] | [symbol] | 0 | [symbol] | [symbol] | 740 |
| HT [symbol] | [symbol] | | | | | | | [symbol] | [symbol] | [symbol] | [symbol] | [symbol] | [symbol] | 11425 | [symbol] | [symbol] |
| [symbol] | 157 | | | | | | | 47222 | 712 | [symbol] | [symbol] | [symbol] | [symbol] | [symbol] | [symbol] | 412 |
| [symbol] -1 | | | | | | | | [symbol] | 579 | 729 | 0 | 0 | 0 | 0 | 0 | 0 |
| [symbol] -4 | | | | | | | | 23439 | 748 | 374 | 0 | 0 | 0 | 0 | 0 | 0 |
| [symbol] -4 | | | | | | | | 44333 | 730 | 134 | 0 | 0 | 0 | 0 | 0 | 0 |
| [symbol] -11 | | | | | | | | [symbol] | 9 | [symbol] | 0 | 0 | 0 | 0 | 0 | 0 |
| [symbol] -12 | | | | | | | | [symbol] 743 | 8 | [symbol] | 0 | 0 | 0 | 0 | 0 | 0 |
| [symbol] -14 | | | | | | | | 20110 | 294 | 311 | 0 | 0 | 0 | 0 | 0 | 0 |
| [symbol] -1 | | | | | | | | 7 [symbol] 4 | [symbol] | 23 | 0 | 0 | 0 | 0 | 0 | 0 |
| [symbol] -2 | | | | | | | | 3130 | [symbol] 1 | 34 | 0 | 0 | 0 | 0 | 0 | 0 |
| [symbol] -3 | | | | | | | | [symbol] | 1703 | [symbol] | 0 | 0 | 0 | 0 | 0 | 0 |
| [symbol] -4 | | | | | | | | [symbol] 2 | 334 | 0 | 0 | 0 | 0 | 0 | 0 | 0 |
| [symbol] -5 | | | | | | | | [symbol] | 0 | 51 | 0 | 0 | 0 | 0 | 0 | 0 |
| [symbol] -6 | | | | | | | | 32 [symbol] | 20 | 0 | 0 | 0 | 0 | 0 | 0 | 0 |
| [symbol] -8 | | | | | | | wt | 19 [symbol] | 23 | [symbol] | 0 | 0 | 0 | 0 | 0 | 0 |
| EXVX-7 | | | | | | | [symbol] | [symbol] | 212 | 0 | 0 | 0 | 0 | 0 | 0 | 0 |
| HCT-118-7 | | | | | | | wt | 6 | 723 | 0 | 0 | 0 | 0 | 0 | 0 | 0 |
| HCT-114-6 | | | | | | | wt | 771 | 122 | [symbol] | 0 | 0 | 0 | 0 | 0 | 0 |
| [symbol] 29-1 | | | | | | | [symbol] | 310 | 0 | 144 | 0 | 0 | 0 | 0 | 0 | 0 |
| [symbol] 29-7 | | | | | | | [symbol] | 0 | 0 | [symbol] | 0 | 0 | 0 | 0 | 0 | 0 |
| [symbol] 29-8 | | | | | | | [symbol] | 0 | 0 | [symbol] | 0 | 0 | 0 | 0 | 0 | 0 |
| SF630-7 | | | | | | | wt | 1 [symbol] 7 | 837 | [symbol] | 0 | 0 | 0 | 0 | 0 | 0 |
| SF630-8 | | | | | | | wt | 3330 | 7 | 130 | 0 | 0 | 0 | 0 | 0 | 0 |
| SF- [symbol] | | | | | | | [symbol] | 17073 | [symbol] 3 | 0 | 0 | 0 | 0 | 0 | 0 | 0 |
| SF- [symbol] | | | | | | | [symbol] | 18222 | 32 | 110 | 0 | 0 | 0 | 0 | 0 | 0 |
| OVCAR-4-7 | | | | | | | wt | 1233 | 29 | 0 | 0 | 0 | 0 | 0 | 0 | 0 |
| OVCAR-4-8 | | | | | | | wt | 12784 | 4 | 171 | 0 | 0 | 0 | 0 | 0 | 0 |
| OVCAR-5-7 | | | | | | | [symbol] | 4722 | 0 | 0 | 0 | 0 | 0 | 0 | 0 | 0 |
| OVCAR-6-7 | | | | | | | [symbol] | 3132 | 0 | 4 | 0 | 0 | 0 | 0 | 0 | 0 |
| MCF-7-8 | | | | | | | wt | 3075 | 440 | 0 | 0 | 0 | 0 | 0 | 0 | 0 |
| [symbol] -8 | | | | | | | [symbol] | 630 | 0 | 0 | 0 | 0 | 0 | 0 | 0 | 0 |
| [symbol] | | | | | | | [symbol] | 1007 | [symbol] | 0 | 0 | 0 | 0 | 0 | 0 | 0 |
| SW400-7 | | | | | | | [symbol] | 1922 | 717 | 22 | 0 | 0 | 0 | 0 | 0 | 0 |
| SW400- [symbol] | | | | | | | [symbol] | 417 | 4 | 72 | 0 | 0 | 0 | 0 | 0 | 0 |
| HT200-8 | | | | | | | [symbol] | 0 | 142 | 10 | 0 | 0 | 0 | 0 | 0 | 0 |
| C32A-7 | | | | | | | [symbol] | 0 | 230 | 4 | 0 | 0 | 0 | 0 | 0 | 0 |
| C32A-8 | | | | | | | [symbol] | 444 | 0 | 0 | 0 | 0 | 0 | 0 | 0 | 0 |
| V2O3-7 | | | | | | | [symbol] | 20013 | 142 | 84 | 0 | 0 | 0 | 0 | 0 | 0 |
| V2O4-8 | | | | | | | [symbol] | 4766 | 416 | 0 | 0 | 0 | 0 | 0 | 0 | 0 |
| [symbol] -7 | | | | | | | wt | 1383 | 0 | 0 | 0 | 0 | 0 | 0 | 0 | 0 |
| [symbol] -8 | | | | | | | wt | 512 | 326 | 0 | 0 | 0 | 0 | 0 | 0 | 0 |
| WI34-8 | | | | | | | wt | 1934 | 41 | 0 | 0 | 0 | 0 | 0 | 0 | 0 |
| [symbol] | | | | | | | | 0 | 0 | 0 | 70 | 5790 | 2685 | 304 | [symbol] | [symbol] |
| [symbol] | | | | | | | | 340 | 0 | 0 | 134 | 1830 | 233 | 6 | 317 | [symbol] |
| [symbol] | | | | | | 84 | | 442 | 0 | 0 | 189 | 5674 | 0 | [symbol] | 0 | 12425 |
| WT374 | | | | | | | | 0 | 0 | 0 | 801 | 4679 | 0 | 0 | 7 | [symbol] |
| WT374 | | | | | | | | 0 | 0 | 34 | 0 | 4412 | 215 | 0 | 0 | 2034 |
| WT330 | | | | | | | | 10732 | 0 | 0 | 0 | 5687 | 5257 | 31 | 154 | [symbol] |
| WT330 | | | | | | | | 0 | 0 | 0 | 0 | 6143 | 163 | 0 | 0 | 34587 |
| [symbol] -3 | | | | | | 173 | | 53 | 0 | 7 | 0 | 3031 | 490 | 325 | 297 | 1816 |
| [symbol] -5 | | | | | | 175 | | 0 | 0 | 55 | 34 | 1424 | 643 | 204 | 0 | 53 |
| [symbol] -9 | | | | | | 177 | | 0 | 0 | 7 | 17 | 2354 | 224 | 0 | 0 | 1290 |
| [symbol] Feb. 25, 2002 [symbol] | | | | | | | | 0 | 0 | 23 | 13 | 3475 | 0 | 112 | 0 | 195 |
| [symbol] -10 | | | | | | 237 | | 0 | 0 | 10 | 123 | 4083 | 130 | 40 | 291 | 3522 |
| WTA-10 | | | | | | | | 0 | 0 | 9 | 0 | 7631 | 0 | 431 | 660 | 1424 |
| [symbol] Mar. 31, 2002 [symbol] | | | | | | | | 0 | 0 | 30 | 23 | 4848 | 0 | 0 | 204 | 603 |
| [symbol] | | | | | | | | 0 | 0 | 0 | 91 | 2003 | 0 | 0 | 0 | [symbol] |
| [symbol] | | | | | | | | 915 | 0 | 0 | 0 | 3067 | 234 | [symbol] | 0 | 2243 |
| [symbol] | | | | | | | | 0 | 0 | 0 | [symbol] | 1148 | 0 | 175 | 0 | 1566 |
| [symbol] | | | | | | | | 0 | 0 | 52 | 0 | 2629 | 0 | 257 | 0 | 3872 |
| HCT-114-3 | | | | | | | wt | 394 | 22 | 2 | 0 | 0 | 0 | 0 | 0 | 0 |
| HCT-114-4 | | | | | | | wt | 434 | 1211 | 0 | 0 | 0 | 0 | 0 | 0 | 0 |
| HCT-114-5 | | | | | | | wt | 127 | 294 | 24 | 0 | 0 | 0 | 0 | 0 | 0 |
| HCT-114-6 | | | | | | | wt | 1178 | 9 | 9 | 0 | 0 | 0 | 0 | 0 | 0 |
| [symbol] | | | | | | | wt | 0 | 0 | 4 | 0 | 0 | 0 | 0 | 0 | 0 |
| WT [symbol] -3 | | | | | | | [symbol] | [symbol] | 0 | 347 | 0 | 0 | 0 | 0 | 0 | 0 |
| EXVX-6 | | | | | | | [symbol] | [symbol] | 0 | 0 | 0 | 0 | 0 | 0 | 0 | 0 |
| HT29-4 | | | | | | | [symbol] | 0 | 17 | 24 | 0 | 0 | 0 | 0 | 0 | 0 |
| HT29-5 | | | | | | | [symbol] | 1078 | 6 | 244 | 0 | 0 | 0 | 0 | 0 | 0 |
| HT29-6 | | | | | | | [symbol] | 0 | 0 | 52 | 0 | 0 | 0 | 0 | 0 | 0 |
| OVCAR-4-2 | | | | | | | wt | 5253 | 10 [symbol] | 30 | 0 | 0 | 0 | 0 | 0 | 0 |
| OVCAR-4-4 | | | | | | | wt | 0 | 0 | 0 | 0 | 0 | 0 | 0 | 0 | 0 |
| OVCAR-4-5 | | | | | | | wt | 2000 | 271 | 0 | 0 | 0 | 0 | 0 | 0 | 0 |
| OVCAR-4-6 | | | | | | | wt | 0 | 0 | 32 | 0 | 0 | 0 | 0 | 0 | 0 |
| [symbol] -3 | | | | | | | wt | 4442 | 146 | 140 | 0 | 0 | 0 | 0 | 0 | 0 |
| [symbol] -4 | | | | | | | wt | 3290 | 291 | 32 | 0 | 0 | 0 | 0 | 0 | 0 |
| [symbol] -5 | | | | | | | wt | 591 | 0 | 30 | 0 | 0 | 0 | 0 | 0 | 0 |
| [symbol] -6 | | | | | | | wt | 1200 | 312 | 0 | 0 | 0 | 0 | 0 | 0 | 0 |
| OVCAR-6-3 | | | | | | | [symbol] | 2344 | 0 | 116 | 0 | 0 | 0 | 0 | 0 | 0 |
| OVCAR-6-4 | | | | | | | [symbol] | 9 | 0 | 31 | 0 | 0 | 0 | 0 | 0 | 0 |
| OVCAR-6-5 | | | | | | | [symbol] | 241 | 0 | 9 | 0 | 0 | 0 | 0 | 0 | 0 |
| OVCAR-6-6 | | | | | | | [symbol] | 99 | 0 | 124 | 0 | 0 | 0 | 0 | 0 | 0 |
| MCF-7- [symbol] | | | | | | | w4 | 620 | [symbol] | [symbol] | 0 | 0 | 0 | 0 | 0 | 0 |
| [symbol] - | | | | | | | MPV E4 | 1297 | 1627 | 0 | 0 | 0 | 0 | 0 | 0 | 0 |
| [symbol] -5 | | | | | | | [symbol] | 0 | 2 [symbol] | 9 | 0 | 0 | 0 | 0 | 0 | 0 |
| SW400-3 | | | | | | | [symbol] | 0 | 303 | 139 | 0 | 0 | 0 | 0 | 0 | 0 |
| SW400-4 | | | | | | | [symbol] | 1137 | [symbol] | 87 | 0 | 0 | 0 | 0 | 0 | 0 |
| SW400-5 | | | | | | | [symbol] | 3274 | 0 | 30 | 0 | 0 | 0 | 0 | 0 | 0 |
| SW400-6 | | | | | | | [symbol] | [symbol] | 726 | 0 | 0 | 0 | 0 | 0 | 0 | 0 |
| C33A-3 | | | | | | | [symbol] | [symbol] | 0 | 10 | 0 | 0 | 0 | 0 | 0 | 0 |
| C33A-4 | | | | | | | [symbol] | 4370 | 0 | 0 | 0 | 0 | 0 | 0 | 0 | 0 |
| C33A-5 | | | | | | | [symbol] | 0 | 876 | 20 | 0 | 0 | 0 | 0 | 0 | 0 |
| C33A-6 | | | | | | | [symbol] | [symbol] | 0 | 0 | 0 | 0 | 0 | 0 | 0 | 0 |
| [symbol] | | | | | | | wt | 0 | 0 | 60 | 0 | 0 | 0 | 0 | 0 | 0 |
| [symbol] -3 | | | | | | | [symbol] | 71007 | [symbol] 3 | 9 | 0 | 0 | 0 | 0 | 0 | 0 |
| [symbol] -4 | | | | | | | [symbol] | 4820 | 0 | 0 | 0 | 0 | 0 | 0 | 0 | 0 |
| [symbol] -5 | | | | | | | [symbol] | 7 [symbol] 1 | 147 | 17 | 0 | 0 | 0 | 0 | 0 | 0 |
| [symbol] -6 | | | | | | | [symbol] | 0 | 0 | 49 | 0 | 0 | 0 | 0 | 0 | 0 |
| WI24- [symbol] | | | | | | | wt | 2111 | 0 | 202 | 0 | 0 | 0 | 0 | 0 | 0 |
| [symbol] -3 | | | | | | | wt | 2002 | 0 | 57 | 0 | 0 | 0 | 0 | 0 | 0 |
| [symbol] -4 | | | | | | | wt | 93108 | 1352 | 240 | 0 | 0 | 0 | 0 | 0 | 0 |
| SF-200-3 | | | | | | | [symbol] | 12 [symbol] | 0 | 0 | 0 | 0 | 0 | 0 | 0 | 0 |
| SF-200-4 | | | | | | | [symbol] | 70341 | 1940 | 0 | 0 | 0 | 0 | 0 | 0 | 0 |
| SF-200-5 | | | | | | | [symbol] | 32200 | 292 | 0 | 0 | 0 | 0 | 0 | 0 | 0 |
| SF-200-6 | | | | | | | [symbol] | 0 | 2127 | 0 | 0 | 0 | 0 | 0 | 0 | 0 |
| [symbol] -17 | | | | | | | | 43184 | 820 | 790 | 0 | 0 | 0 | 0 | 0 | 0 |
| [symbol] -20 | | | | | | | | 5419 | 5443 | 71 | 0 | 0 | 0 | 0 | 0 | 0 |
| [symbol] -21 | | | | | | | | 6234 | 3043 | 129 | 0 | 0 | 0 | 0 | 0 | 0 |
| [symbol] -22 | | | | | | | | 70 [symbol] | 9867 | 300 | 0 | 0 | 0 | 0 | 0 | 0 |
| OVCAR- [symbol] | | | | | | | [symbol] | [symbol] 10 | 783 | 112 | 0 | 0 | 0 | 0 | 0 | 0 |
| [symbol] -10 | | | | | | | | 2794 | 1333 | 113 | 0 | 0 | 0 | 0 | 0 | 0 |
| [symbol] -11 | | | | | | | | [symbol] | 701 | 45 | 0 | 0 | 0 | 0 | 0 | 0 |
| [symbol] -12 | | | | | | | | [symbol] | 81 | 296 | 0 | 0 | 0 | 0 | 0 | 0 |
| [symbol] -13 | | | | | | | | 4834 | 133 | 1023 | 0 | 0 | 0 | 0 | 0 | 0 |
| [symbol] -14 | | | | | | | | 4337 | 0 | 891 | 0 | 0 | 0 | 0 | 0 | 0 |
| [symbol] -15 | | | | | | | | [symbol] | 0 | 1013 | 0 | 0 | 0 | 0 | 0 | 0 |
| [symbol] -16 | | | | | | | | 3477 | 2 | 0 | 0 | 0 | 0 | 0 | 0 | 0 |
| [symbol] -17 | | | | | | | | 1275 | 6 | 195 | 0 | 0 | 0 | 0 | 0 | 0 |
| [symbol] -18 | | | | | | | | 12 [symbol] | 3430 | 995 | 0 | 0 | 0 | 0 | 0 | 0 |
| [symbol] -19 | | | | | | | | 3 | 0 | 0 | 0 | 0 | 0 | 0 | 0 | 0 |
| [symbol] | | 1 | | | | | | 1179 | [symbol] | 13724 | 10216 | 11733 | 18738 | [symbol] | [symbol] | [symbol] |
| [symbol] | | 2 | | | | | | 1842 | [symbol] | [symbol] | [symbol] | [symbol] | [symbol] | [symbol] | [symbol] | [symbol] |
| [symbol] | | 3 | | | | | | [symbol] | [symbol] | [symbol] | [symbol] | [symbol] | [symbol] | [symbol] | [symbol] | [symbol] |
| [symbol] | | 4 | | | | | | 102 | [symbol] | [symbol] | [symbol] | [symbol] | [symbol] | [symbol] | [symbol] | [symbol] |
| [symbol] | | 5 | | | | | | 2734 | 23741 | [symbol] | [symbol] | 113857 | [symbol] | [symbol] | [symbol] | [symbol] |
| [symbol] | | 6 | | | | | | 2187 | [symbol] | [symbol] | [symbol] | [symbol] | [symbol] | [symbol] | [symbol] | [symbol] |
| [symbol] | | 7 | | | | | | [symbol] | [symbol] | [symbol] | [symbol] | [symbol] | [symbol] | [symbol] | [symbol] | [symbol] |
| [symbol] | | 8 | | | | | | 2102 | [symbol] | [symbol] | [symbol] | [symbol] | [symbol] | [symbol] | [symbol] | [symbol] |
| [symbol] | | 9 | | | | | | [symbol] | [symbol] | [symbol] | [symbol] | [symbol] | [symbol] | [symbol] | [symbol] | [symbol] |
| [symbol] | | 10 | | | | | | [symbol] | [symbol] | [symbol] | [symbol] | [symbol] | [symbol] | [symbol] | [symbol] | [symbol] |
| [symbol] | | 11 | | | | | | [symbol] | [symbol] | [symbol] | [symbol] | [symbol] | [symbol] | [symbol] | [symbol] | [symbol] |
| [symbol] | | 12 | | | | | | [symbol] | [symbol] | [symbol] | [symbol] | [symbol] | [symbol] | [symbol] | [symbol] | [symbol] |
| [symbol] | | 13 | | | | | | 1276 | [symbol] | [symbol] | [symbol] | [symbol] | [symbol] | [symbol] | [symbol] | [symbol] |
| [symbol] | | 14 | | | | | | [symbol] | [symbol] | [symbol] | [symbol] | [symbol] | [symbol] | [symbol] | 47817 | [symbol] |
| [symbol] | | 15 | | | | | | [symbol] | [symbol] | [symbol] | [symbol] | [symbol] | [symbol] | [symbol] | 23301 | [symbol] |
| [symbol] | | 16 | | | | | | 1234 | [symbol] | [symbol] | [symbol] | [symbol] | [symbol] | [symbol] | [symbol] | [symbol] |
| [symbol] | | 17 | | | | | | 2013 | [symbol] | [symbol] | [symbol] | [symbol] | [symbol] | [symbol] | [symbol] | [symbol] |
| [symbol] | | 18 | | | | | | [symbol] | [symbol] | [symbol] | [symbol] | [symbol] | [symbol] | [symbol] | 8412 | [symbol] |
| [symbol] | | 19 | | | | | | 2970 | [symbol] | [symbol] | [symbol] | [symbol] | [symbol] | [symbol] | [symbol] | [symbol] |
| [symbol] | | 20 | | | | | | 4795 | [symbol] | 23720 | [symbol] | [symbol] | [symbol] | [symbol] | [symbol] | [symbol] |
| [symbol] | | 21 | | | | | | [symbol] | [symbol] | 15471 | [symbol] | [symbol] | [symbol] | [symbol] | 1081 | [symbol] |
| [symbol] | | 22 | | | | | | 484 | [symbol] | 15711 | [symbol] | [symbol] | [symbol] | [symbol] | [symbol] | [symbol] |
| [symbol] | | 23 | | | | | | 1419 | [symbol] | 20778 | [symbol] | [symbol] | [symbol] | [symbol] | 4881 | [symbol] |
| [symbol] | | 24 | | | | | | [symbol] | [symbol] | 22132 | 2177 | [symbol] | [symbol] | [symbol] | [symbol] | [symbol] |
| [symbol] | | 25 | | | | | | 1876 | [symbol] | 10425 | [symbol] | [symbol] | [symbol] | [symbol] | [symbol] | [symbol] |
| [symbol] | | 26 | | | | | | 294 | [symbol] | 103115 | 6714 | [symbol] | [symbol] | [symbol] | 20107 | [symbol] |
| [symbol] | | 27 | | | | | | [symbol] | [symbol] | [symbol] | [symbol] | [symbol] | [symbol] | [symbol] | [symbol] | [symbol] |
| [symbol] | | 28 | | | | 28 | | 204 | [symbol] | 14425 | [symbol] | [symbol] | [symbol] | [symbol] | 0 | [symbol] |
| [symbol] | | 29 | | | | | | [symbol] | [symbol] | [symbol] | [symbol] | [symbol] | [symbol] | [symbol] | [symbol] | [symbol] |
| [symbol] | | 30 | | | | 30 | | 100 | [symbol] | [symbol] | [symbol] | [symbol] | [symbol] | [symbol] | 13265 | [symbol] |
| [symbol] | | 31 | | | | | | [symbol] | [symbol] | [symbol] | [symbol] | 0 | [symbol] | [symbol] | 21164 | [symbol] |
| [symbol] | | 32 | | | | | | [symbol] | [symbol] | [symbol] | 1729 | 34917 | [symbol] | [symbol] | 5423 | [symbol] |
| [symbol] | | 33 | | | | | | [symbol] | [symbol] | 41825 | $113 | 436 | [symbol] | [symbol] | [symbol] | [symbol] |
| [symbol] | | 34 | | | | | | 0 | [symbol] | [symbol] | 3353 | 290 | 18410 | [symbol] | 4218 | [symbol] |
| [symbol] | | 35 | | | | | | [symbol] | [symbol] | [symbol] | [symbol] | 434 | 17803 | [symbol] | [symbol] | [symbol] |
| [symbol] | | 36 | | | | | | 1743 | [symbol] | [symbol] | 0 | [symbol] | 5241 | [symbol] | 3205 | [symbol] |
| [symbol] | | 37 | | | | | | 621 | [symbol] | 12132 | [symbol] | 1096 | 7190 | [symbol] | [symbol] | [symbol] |
| [symbol] | | 38 | | | | | | 0 | [symbol] | [symbol] | [symbol] | 100 | 4538 | [symbol] | 30874 | [symbol] |
| [symbol] | | 39 | | | | | | [symbol] | [symbol] | [symbol] | 1071 | [symbol] | 14300 | [symbol] | 1733 | [symbol] |
| [symbol] | | 40 | | | | | | 1510 | [symbol] | 0 | [symbol] | 406 | 4578 | [symbol] | [symbol] | [symbol] |
| [symbol] | | 41 | | | | | | 927 | [symbol] | [symbol] | [symbol] | [symbol] | [symbol] | [symbol] | [symbol] | [symbol] |
| [symbol] | | 42 | | | | | | 1470 | [symbol] | 742 | 4500 | 0 | 4145 | [symbol] | [symbol] | [symbol] |
| [symbol] | | 43 | | | | | | [symbol] | [symbol] | [symbol] | 103 | 0 | [symbol] | [symbol] | 3474 | [symbol] |
| [symbol] | | 44 | | | | | | [symbol] | [symbol] | [symbol] | [symbol] | 130 | [symbol] | 2101 | 10038 | [symbol] |
| [symbol] | | | | | [symbol] | | | 0 | [symbol] | [symbol] | [symbol] | 0 | 13181 | 1814 | 501 | [symbol] |
| [symbol] | | | | | 383 | | | 0 | [symbol] | 752 | 4540 | 22 | [symbol] | 1702 | 0 | [symbol] |
| [symbol] | | | | | 361 | | | 451 | [symbol] | 0 | 70 | 5137 | 143 | [symbol] | 338 | [symbol] |
| [symbol] | | | | | 356 | 354 | | 290 | [symbol] | [symbol] | 131 | [symbol] | 171 | 14131 | 14830 | [symbol] |
| [symbol] | | | | | 354 | 354 | | [symbol] | [symbol] | 0 | 0 | [symbol] | 10447 | [symbol] | 2525 | [symbol] |
| [symbol] | | | | | 344 | | | 0 | [symbol] | [symbol] | [symbol] | 0 | [symbol] | 2304 | 1411 | [symbol] |
| [symbol] | | | | | 342 | 334 | | 0 | [symbol] | 0 | 21 | 257 | 428 | [symbol] | 443 | [symbol] |
| [symbol] | | | | | 334 | | | [symbol] | [symbol] | 1144 | [symbol] | 7 | 129 | 4204 | 274 | [symbol] |
| [symbol] | | | | | 332 | | | 153 | [symbol] | [symbol] | 175 | [symbol] | 701 | [symbol] | 0 | [symbol] |
| [symbol] | | | | | 330 | | | 0 | [symbol] | 0 | 0 | [symbol] | [symbol] | [symbol] | 0 | [symbol] |
| [symbol] | | | | | 328 | | | 254 | [symbol] | 0 | [symbol] | 1 | 34 | [symbol] | 3700 | [symbol] |
| [symbol] | | | | | 327 | | | 1213 | [symbol] | 0 | 0 | 5123 | [symbol] | [symbol] | [symbol] | [symbol] |
| [symbol] | | | | | [symbol] | | | [symbol] | [symbol] | 125 | [symbol] | 1 | 1023 | [symbol] | [symbol] | [symbol] |
| [symbol] | | | | | 321 | | | 0 | [symbol] | 0 | 87 | 214 | 4823 | [symbol] | 152 | [symbol] |
| [symbol] | | | | | 320 | | | 1317 | [symbol] | 0 | [symbol] | 1631 | 1315 | 2550 | [symbol] | [symbol] |
| [symbol] | | | | | 318 | | | 0 | [symbol] | [symbol] | 0 | [symbol] | 5813 | 4217 | 30278 | [symbol] |
| [symbol] | | | | | 318 | | | 0 | [symbol] | 0 | [symbol] | 151 | [symbol] | 11200 | 140783 | [symbol] |
| [symbol] | | | | | 314 | | | 1 | [symbol] | 72 | 1232 | 0 | 12222 | 2519 | [symbol] | [symbol] |
| [symbol] | | | | | 311 | | | 0 | [symbol] | [symbol] | [symbol] | 120 | 10332 | 2442 | 4572 | [symbol] |
| [symbol] | | | | | [symbol] | | | 0 | [symbol] | [symbol] | [symbol] | [symbol] | 2734 | [symbol] | 5044 | [symbol] |
| [symbol] | | | | | [symbol] | | | [symbol] | [symbol] | 0 | 0 | 0 | 1822 | [symbol] | 2133 | [symbol] |
| [symbol] | | | | | [symbol] | | | 0 | [symbol] | 0 | 0 | 0 | 1127 | 4341 | [symbol] | [symbol] |
| [symbol] | | | | | [symbol] | | | 0 | [symbol] | 0 | 233 | 220 | [symbol] | [symbol] | [symbol] | [symbol] |
| [symbol] | | | | | [symbol] | | | 650 | [symbol] | 0 | 0 | 0 | [symbol] | [symbol] | [symbol] | [symbol] |
| [symbol] | | | | | [symbol] | | | 0 | [symbol] | 0 | [symbol] | 0 | [symbol] | [symbol] | [symbol] | [symbol] |
| [symbol] | | | | | [symbol] | | | 104 | [symbol] | [symbol] | 114 | [symbol] | [symbol] | 4436 | 18214 | [symbol] |
| [symbol] | | | | | 302 | | | 1973 | [symbol] | 0 | 45 | 1802 | [symbol] | [symbol] | [symbol] | [symbol] |
| [symbol] | | | | | 297 | | | 1947 | [symbol] | 1050 | 487 | [symbol] | [symbol] | 6236 | 29075 | [symbol] |
| [symbol] | | | | | 296 | | | [symbol] | [symbol] | [symbol] | [symbol] | 117 | 19310 | 2770 | 13181 | [symbol] |
| [symbol] | | | | | 294 | | | 205 | [symbol] | 0 | [symbol] | $1208 | 8744 | 7973 | [symbol] | [symbol] |
| [symbol] | | | | | 292 | | | [symbol] | [symbol] | 0 | 330 | 70 | [symbol] | 2923 | 11584 | [symbol] |
| [symbol] | | | | | 290 | | | 2157 | [symbol] | 0 | 137 | [symbol] | 10727 | [symbol] | 8383 | [symbol] |
| [symbol] | | | | | 279 | | | 0 | [symbol] | 0 | 52 | 0 | 1241 | [symbol] | 23427 | [symbol] |
| [symbol] | | | | | 277 | | | 0 | [symbol] | 0 | 0 | 0 | 11134 | 2195 | [symbol] | [symbol] |
| [symbol] | | | | | 275 | 275 | | [symbol] | [symbol] | [symbol] | [symbol] | 0 | 0 | [symbol] | 675 | [symbol] |
| [symbol] | | | | | [symbol] | | | 0 | [symbol] | 0 | 0 | 247 | [symbol] | 3137 | 0 | [symbol] |
| [symbol] | | | | | [symbol] | | | 2212 | [symbol] | [symbol] | 114 | [symbol] | [symbol] | [symbol] | 407 | [symbol] |
| [symbol] | | | | | [symbol] | 230 | | [symbol] | [symbol] | 2131 | 152 | 0 | 0 | 4200 | 2147 | [symbol] |
| [symbol] | | | | | 235 | 235 | | 0 | [symbol] | 0 | 0 | 0 | 1078 | 2783 | 10003 | [symbol] |
| [symbol] | | | | | 234 | | | 0 | [symbol] | 1494 | 0 | 0 | [symbol] | 3430 | 1723 | [symbol] |
| [symbol] | | | | | 233 | 233 | | 3431 | [symbol] | [symbol] | 420 | 227 | 2750 | [symbol] | 403 | [symbol] |
| [symbol] | | | | | 231 | 231 | | [symbol] | [symbol] | 1405 | 116 | 0 | 17 | 2754 | 4357 | [symbol] |
| [symbol] | | | | | 229 | 229 | | 197 | [symbol] | 1572 | 17 | 23 | [symbol] | [symbol] | [symbol] | [symbol] |
| [symbol] | | | | | 227 | 227 | | [symbol] | [symbol] | 54 | 0 | [symbol] | 1455 | 2494 | 2380 | [symbol] |
| [symbol] | | | | | 222 | | | 250 | [symbol] | 55 | 145 | 322 | 1082 | [symbol] | [symbol] | [symbol] |
| [symbol] | | | | | 215 | | | 0 | [symbol] | 229 | 17 | 29 | 1520 | 3087 | 343 | [symbol] |
| [symbol] | | | | | 214 | | | 0 | [symbol] | 0 | 0 | 0 | 0 | [symbol] | 1770 | [symbol] |
| [symbol] | | | | | 213 | | | 0 | [symbol] | 0 | 0 | [symbol] | [symbol] | 2202 | [symbol] | [symbol] |
| [symbol] | | | | | 212 | | | 130 | [symbol] | 0 | 0 | 153 | [symbol] | [symbol] | 480 | [symbol] |
| [symbol] | | | | | 211 | 211 | | 135 | [symbol] | 412 | 0 | 117 | 454 | 2312 | 7793 | [symbol] |
| [symbol] | | | | | 210 | | | 0 | [symbol] | 40 | 0 | 220 | [symbol] | [symbol] | 1 | [symbol] |
| [symbol] | | | | | 209 | | | 170 | [symbol] | 0 | [symbol] | [symbol] | 0 | 2108 | 4178 | [symbol] |
| [symbol] | | | | | 205 | | | [symbol] | [symbol] | 0 | 4 | 0 | 483 | 1052 | 0 | [symbol] |
| [symbol] | | | | | 203 | | | [symbol] | [symbol] | 0 | 13 | [symbol] | 3 | [symbol] | 238 | [symbol] |
| [symbol] | | | | | 201 | | | 0 | [symbol] | 0 | 0 | 0 | 180 | 2429 | 124 | [symbol] |
| [symbol] | | | | | 180 | | | 385 | [symbol] | 0 | [symbol] | [symbol] | 0 | 2744 | 304 | [symbol] |
| [symbol] | | | | | 187 | | | 0 | [symbol] | 0 | [symbol] | 411 | 2172 | 2792 | 380 | [symbol] |
| [symbol] | | | | | 194 | | | [symbol] | [symbol] | 0 | 132 | 22 | 534 | 1518 | 2052 | [symbol] |
| [symbol] | | | | | 193 | | | 0 | [symbol] | 0 | 0 | 25 | 294 | 1254 | 42 | [symbol] |
| [symbol] | | | | | [symbol] | | | 0 | [symbol] | 0 | 204 | 0 | [symbol] | [symbol] | 2652 | [symbol] |
| [symbol] | | | | | [symbol] | | | 0 | [symbol] | 0 | 0 | 0 | [symbol] | 830 | 72 | [symbol] |
| [symbol] | | | | | 50 | | | 0 | [symbol] | 0 | 158 | 84 | [symbol] | 2001 | 170 | 34783 |
| [symbol] | | | | | 57 | | | 0 | [symbol] | 43 | [symbol] | 0 | 2379 | 2154 | 5507 | 175192 |
| [symbol] | | | | | [symbol] | | | 1173 | [symbol] | [symbol] | 0 | [symbol] | 1020 | 2135 | 3445 | [symbol] |
| [symbol] | | | | | 53 | | | 273 | [symbol] | [symbol] | 0 | 0 | 0 | 777 | [symbol] | [symbol] |
| [symbol] | | | | | [symbol] | | | 0 | [symbol] | 0 | [symbol] | 176 | 0 | 1157 | 822 | [symbol] |
| [symbol] | | | | | 40 | | | 380 | [symbol] | [symbol] | [symbol] | 0 | [symbol] | [symbol] | [symbol] | 23343 |
| HELA [symbol] | | | | 79 | | | | [symbol] | [symbol] | 0 | [symbol] | [symbol] | [symbol] | 2750 | 5247 | 95108 |
| HELA [symbol] | | | | 81 | | | | [symbol] | [symbol] | [symbol] | [symbol] | 0 | 781 | 2330 | 21234 | [symbol] |
| HELA [symbol] | | | | [symbol] | | | | [symbol] | [symbol] | 0 | 50 | 203 | 1276 | 2295 | [symbol] | [symbol] |
| HELA [symbol] | | | | [symbol] | | | | [symbol] | [symbol] | 0 | [symbol] | 80 | 2720 | 1297 | 4512 | [symbol] |
| HELA [symbol] | | | | [symbol] | | | | [symbol] | [symbol] | [symbol] | 0 | 81 | 0 | 1843 | 4070 | 23775 |
| HELA [symbol] | | | | [symbol] | | | | [symbol] | [symbol] | 0 | [symbol] | 82 | [symbol] | 1744 | 4304 | [symbol] |
| HELA [symbol] | | | | [symbol] | | | | [symbol] | [symbol] | 0 | [symbol] | 90 | [symbol] | 1781 | 3048 | [symbol] |
| HELA [symbol] | | | | [symbol] | | | | [symbol] | [symbol] | 0 | 195 | 192 | 0 | [symbol] | 7823 | 78133 |
| HELA [symbol] | | | | [symbol] | | | | [symbol] | [symbol] | 0 | 0 | 0 | [symbol] | 1400 | 2544 | [symbol] |
| [symbol] | | | | [symbol] | | | | [symbol] | [symbol] | 0 | [symbol] | [symbol] | [symbol] | 4158 | 1829 | [symbol] |
| [symbol] | | | | 148 | | | | [symbol] | [symbol] | 0 | 703 | [symbol] | 432 | 2184 | [symbol] | [symbol] |
| [symbol] | | | | 150 | | | | 0 | [symbol] | 0 | 275 | 0 | 378 | 1871 | 13323 | 24403 |
| [symbol] | | | | 152 | | | | [symbol] | [symbol] | 0 | [symbol] | 0 | 1114 | 2329 | [symbol] | [symbol] |
| [symbol] | | | | 154 | | | | [symbol] | [symbol] | 0 | [symbol] | 40 | 2304 | 3295 | 17173 | 20001 |
| [symbol] | | | | 154 | | | | 0 | [symbol] | 432 | 233 | 0 | 1122 | 1851 | [symbol] | 14348 |
| [symbol] | | | | [symbol] | | | | 0 | [symbol] | 0 | 87 | 434 | 732 | 254 | 2043 | [symbol] |
| CCRF [symbol] | | | | 180 | | | | [symbol] | [symbol] | 0 | 0 | 128 | 821 | [symbol] | 303 | [symbol] |
| [symbol] 145 | | | | 152 | | | | 0 | [symbol] | 0 | [symbol] | 40 | [symbol] | 1957 | 13480 | 18145 |
| MC7 [symbol] | | | | 184 | | | | 0 | [symbol] | 0 | 245 | 0 | 471 | 1324 | 19125 | 12384 |
| [symbol] 5737 | 154 | | | | | | | [symbol] | 143 | 111814 | 7208 | [symbol] | [symbol] | 8343 | 0 | [symbol] |
| MCF- [symbol] | 153 | | | | | | | [symbol] | [symbol] | 70411 | 721 | 387 | 0 | [symbol] | 0 | 838 |
| MCF 7 | 151 | | | | | | | [symbol] | [symbol] | 30804 | 11834 | 2980 | 278 | [symbol] | 0 | 0 |
| [symbol] | 148 | | | | | | | [symbol] | 371 | 22234 | 15025 | 2725 | 157 | [symbol] | 975 | 73 |
| UACC-257 | 147 | | | | | | | [symbol] | [symbol] | 72330 | 4018 | 111 | 0 | [symbol] | 0 | 311 |
| UACC-42 | 145 | | | | | | | 27441 | [symbol] | [symbol] | 202 | [symbol] | 74 | [symbol] | 346 | 271 |
| [symbol] | 144 | | | | | | | 30051 | 71 | [symbol] | 1402 | 2016 | 634 | 4067 | 175 | 274 |
| UO-31 | 143 | | | | | | | 34230 | [symbol] | [symbol] | 2316 | 644 | 1204 | 1427 | 1885 | 0 |
| [symbol] | 142 | | | | | | | [symbol] | [symbol] | 137676 | 1062 | 110 | 280 | [symbol] | 490 | 134 |
| [symbol] | 141 | | | | | | | [symbol] | 297 | [symbol] | 3025 | [symbol] | 85 | 1287 | 0 | 329 |
| [symbol] | 140 | | | | | | | 30507 | 0 | [symbol] | 2329 | 927 | 495 | [symbol] | 0 | 180 |
| MCT-15 | 139 | | | | | | | 34734 | 441 | [symbol] | 2790 | 1872 | 397 | [symbol] | 842 | 0 |
| [symbol] | 138 | | | | | | | [symbol] | [symbol] | [symbol] | 4322 | 243 | 294 | 12794 | 224 | [symbol] 1 |
| COLO [symbol] | 137 | | | | | | | 57728 | 433 | [symbol] | 2580 | 495 | 0 | [symbol] | 0 | 174 |
| LOX [symbol] | 136 | | | | | | | [symbol] | [symbol] | [symbol] | 1512 | [symbol] | 983 | [symbol] | 248 | 839 |
| [symbol] | 135 | | | | | | | [symbol] | 437 | [symbol] | 730 | [symbol] | 100 | [symbol] | 375 | [symbol] |
| [symbol] | 134 | | | | | | | 43207 | [symbol] | [symbol] | 1719 | [symbol] | 382 | 7085 | 72 | [symbol] |
| MCT 114 | 133 | | | | | | | 37406 | 345 | [symbol] | 1175 | 0 | 458 | 3813 | 721 | [symbol] |
| [symbol] | 132 | | | | | | | 34176 | [symbol] | 27523 | 0 | 534 | 757 | [symbol] | 967 | 14 |
| HCC- [symbol] | 131 | | | | | | | [symbol] | 734 | 17230 | 0 | 125 | [symbol] | [symbol] | 0 | 641 |
| [symbol] | 130 | | | | | | | [symbol] | 229 | 91730 | 1652 | 917 | 303 | [symbol] | 25 | [symbol] |
| [symbol] | 129 | | | | | | | 34742 | 33 | 90087 | 1005 | 106 | 457 | [symbol] | 819 | 0 |
| [symbol] | 128 | | | | | | | 40664 | 304 | [symbol] | 3145 | 3477 | 2041 | [symbol] | 478 | 0 |
| DU-145 | 127 | | | | | | | 37777 | [symbol] | 8182 | 5183 | 140 | 480 | [symbol] | 0 | 0 |
| [symbol] | 126 | | | | | | | 36217 | 331 | 61753 | 9431 | 94 | 827 | [symbol] | [symbol] | 110 |
| [symbol] | 125 | | | | | | | 37858 | [symbol] | [symbol] | 7367 | 1172 | 961 | [symbol] | 134 | 0 |
| [symbol] | 124 | | | | | | | 38104 | [symbol] | 106212 | 4214 | 0 | 1685 | 2875 | 423 | [symbol] |
| [symbol] | 123 | | | | | | | 23005 | 737 | 8134 | 2800 | 3182 | 625 | 13014 | 0 | 0 |
| SN12C | 122 | | | | | | | 32675 | [symbol] | 64277 | 634 | 1472 | 180 | 23636 | 0 | 637 |
| ML- [symbol] | 121 | | | | | | | 36449 | [symbol] | 2018 | 0 | 325 | 771 | 707 | [symbol] | 3 [symbol] |
| [symbol] , T-4 | 120 | | | | | | | 28305 | 783 | 17193 | 961 | 132 | 1023 | 4038 | 0 | 0 |
| OVCAR- [symbol] | 119 | | | | | | | 25375 | [symbol] | 42224 | 1995 | 2371 | 1966 | 6812 | [symbol] | 77 |
| X- [symbol] | 118 | | | | | | | 34213 | [symbol] | 18143 | 2124 | 342 | 222 | 6444 | 0 | 0 |
| OVCAR-4 | 117 | | | | | | | 42145 | 1500 | 10042 | 2320 | 2728 | 2583 | 6751 | 1276 | 1110 |
| CCRF-CEM | 116 | | | | | | | 38130 | 576 | 10022 | 2781 | 831 | 470 | 41505 | 0 | 0 |
| OVCAR-3 | 115 | | | | | | | 63017 | 548 | 47001 | 1242 | 940 | 303 | 19348 | 2443 | 0 |
| [symbol] | 114 | | | | | | | 30005 | [symbol] | 14022 | 3425 | 0 | 350 | 18283 | 0 | 252 |
| MCF- [symbol] | 113 | | | | | | | 19678 | [symbol] | 84330 | 1645 | 1196 | 406 | 1725 | 0 | 100 |
| [symbol] | 112 | | | | | | | 40230 | 257 | 17808 | 700 | 708 | 1164 | 8394 | 417 | 837 |
| [symbol] TCC | 111 | | | | | | | 47430 | 0 | 78724 | 1670 | 495 | 303 | 17019 | 1114 | 472 |
| 5F- [symbol] | 110 | | | | | | | 30345 | 64 | 64487 | 972 | 185 | 76 | 13642 | 437 | [symbol] |
| NC3- [symbol] | 109 | | | | | | | 44511 | 0 | 81076 | 585 | 813 | 276 | 4038 | 0 | 94 |
| U251 | 108 | | | | | | | 54075 | 431 | [symbol] | 573 | 134 | 713 | 17677 | 804 | 0 |
| NCL- [symbol] | 107 | | | | | | | [symbol] | [symbol] | 78179 | 436 | 405 | 603 | 17566 | 808 | 132 |
| [symbol] -75 | 106 | | | | | | | 41104 | 0 | 17012 | 403 | 416 | [symbol] | 4792 | [symbol] | 316 |
| NCI- [symbol] | 105 | | | | | | | 40037 | [symbol] | 10280 | 2064 | 4822 | 461 | 28230 | [symbol] | 0 |
| [symbol] -1 [symbol] | 104 | | | | | | | 40554 | 442 | 13825 | 1417 | 491 | 2644 | 32964 | 166 | 676 |
| NCI-H23 | 103 | | | | | | | 41587 | 633 | 6072 | 2204 | 1331 | 604 | 16328 | 743 | 60 |
| S [symbol] -OV-3 | 102 | | | | | | | 32170 | 0 | 18584 | 2641 | 522 | 200 | [symbol] | 343 | 61 |
| NCI-H23 | 101 | | | | | | | 30431 | 0 | 6416 | 4702 | 140 | 243 | [symbol] | 0 | 481 |
| [symbol] | 100 | | | | | | | 41930 | 442 | 11790 | 3091 | 229 | 303 | 11318 | 0 | 0 |
| EKVX | 99 | | | | | | | 23917 | 0 | 14173 | 1822 | 0 | 642 | 31477 | 0 | 0 |
| OVCAR-3 | 98 | | | | | | | 31129 | 0 | 7829 | 48 | 101 | 793 | 9392 | 11 | 0 |
| MCP-42 | 97 | | | | | | | 33300 | 0 | 18542 | 1074 | 384 | 465 | 12792 | 482 | 197 |
| [symbol] | 48 | | | | | | | 32440 | 0 | 9173 | 1588 | 6279 | 341 | 401 | 300 | 184 |
| [symbol] | 47 | | | | | | | 32837 | [symbol] | 0 | 2785 | 0 | 120 | 0 | 983 | 127 |
| [symbol] | 46 | | | | | | | 29124 | [symbol] | 23461 | 1117 | 0 | 92 | 10370 | 344 | 0 |
| TOGF | 24 | | | | | | | 22953 | 700 | 18106 | 7310 | [symbol] | 130 | 6277 | 1704 | 111 |
| A545-1 | | | | | | | [symbol] | 0 | 0 | 0 | 348 | 1134 | [symbol] | 415 | 571 | 0 |
| A545-3 | | | | | | | [symbol] | 0 | 0 | 0 | 871 | 134 | 4878 | 830 | 1033 | 0 |
| A545-4 | | | | | | | [symbol] | 0 | 0 | 0 | 0 | 1291 | [symbol] | 0 | [symbol] | 0 |
| A545-6 | | | | | | | [symbol] | 0 | 0 | 0 | 0 | 484 | [symbol] | 134 | 0 | 0 |
| A545-7 | | | | | | | [symbol] | 0 | 0 | 0 | 0 | 813 | [symbol] | 787 | 0 | 0 |
| EKVX-1 | | | | | | | [symbol] | 0 | 0 | 0 | 1360 | 3426 | [symbol] | 476 | 2338 | 0 |
| EKVX-4 | | | | | | | [symbol] | 0 | 0 | 0 | [symbol] | 4219 | [symbol] | 330 | 180 | 0 |
| EKVX-3 | | | | | | | [symbol] | 0 | 0 | 0 | 1806 | 0 | [symbol] | 0 | 706 | 0 |
| EKVX-6 | | | | | | | [symbol] | 0 | 0 | 0 | 284 | 1113 | [symbol] | 137 | 0 | 0 |
| EKVX-7 | | | | | | | [symbol] | 0 | 0 | 0 | 0 | 37 | 7443 | 867 | 0 | 0 |
| MCF-7-1 | | | | | | | [symbol] | 0 | 0 | 0 | 483 | 801 | 710 | 3344 | 134 | 0 |
| MCF-7-3 | | | | | | | [symbol] | 0 | 0 | 0 | 18 | 1045 | [symbol] | 0 | 482 | 0 |
| MCF-7-4 | | | | | | | [symbol] | 0 | 0 | 0 | 675 | 827 | 2087 | 218 | 13 [symbol] | 0 |
| MCF-7-5 | | | | | | | [symbol] | 0 | 0 | 0 | 1191 | 2431 | 1029 | 0 | [symbol] | 0 |
| MCF-7-7 | | | | | | | [symbol] | 0 | 0 | 0 | 0 | [symbol] | 4028 | 407 | 829 | 0 |
| ADR-RES-1 | | | | | | | [symbol] | 0 | 0 | 0 | 0 | 2734 | 433 | 4006 | [symbol] | 0 |
| ADR-RES-3 | | | | | | | [symbol] | 0 | 0 | 0 | 1145 | 3482 | 2797 | 1066 | 0 | 0 |
| ADR-RES-4 | | | | | | | [symbol] | 0 | 0 | 0 | 112 | 0 | 4038 | 637 | 801 | 0 |
| ADR-RES-5 | | | | | | | [symbol] | 0 | 0 | 0 | 403 | 2300 | 3017 | 0 | 0 | 0 |
| ADR-RES-7 | | | | | | | [symbol] | 0 | 0 | 0 | 2011 | 2904 | 842 | [symbol] | 4 [symbol] | 0 |
| WI 34-1 | | | | | | | [symbol] | 0 | 0 | 0 | 0 | 7754 | 1845 | 529 | 18311 | 0 |
| WI 34-3 | | | | | | | [symbol] | 0 | 0 | 0 | [symbol] | [symbol] | 3848 | 187 | 0 | 0 |
| WI 34-4 | | | | | | | [symbol] | 0 | 0 | 0 | 1631 | 2095 | 8250 | 0 | 1650 | 0 |
| WI 34-5 | | | | | | | [symbol] | 0 | 0 | 0 | 1300 | 7877 | 6484 | 683 | 547 | 0 |
| WI 34-7 | | | | | | | [symbol] | 0 | 0 | 0 | 1458 | 3377 | 3293 | 312 | 0 | 0 |
| [symbol] -1 | | | | | | | [symbol] E4 | 0 | 0 | 0 | [symbol] | 0 | 5828 | 0 | 80 | 0 |
| [symbol] -3 | | | | | | | [symbol] E4 | 0 | 0 | 0 | 642 | 849 | 1015 | 644 | 0 | 0 |
| [symbol] -4 | | | | | | | [symbol] E4 | 0 | 0 | 0 | 280 | 281 | 4257 | 335 | 850 | 0 |
| [symbol] -5 | | | | | | | [symbol] E4 | 0 | 0 | 0 | 1177 | 1708 | [symbol] | 1280 | 173 | 0 |
| [symbol] -7 | | | | | | | [symbol] E4 | 0 | 0 | 0 | 1543 | 274 | 4044 | 0 | 0 | 0 |
| H1 [symbol] -1 | | | | | | | [symbol] | 0 | 0 | 0 | 114 | 7085 | 4794 | 0 | 237 | 0 |
| H1 [symbol] -3 | | | | | | | [symbol] | 0 | 0 | 0 | 0 | 431 | 2347 | 542 | 906 | 0 |
| H1 [symbol] -4 | | | | | | | [symbol] | 0 | 0 | 0 | 767 | 123 | 2212 | 421 | 817 | 0 |
| H1 [symbol] -5 | | | | | | | [symbol] | 0 | 0 | 0 | 0 | 1456 | 4474 | 26 | 0 | 0 |
| H1 [symbol] -7 | | | | | | | [symbol] | 0 | 0 | 0 | 468 | 1883 | 2279 | 10 | 0 | 0 |
| [symbol] -2 | | | | | | | [symbol] | 0 | 0 | 0 | 234 | 764 | 1167 | 204 | 834 | 0 |
| EXVX-2 | | | | | | | [symbol] | 0 | 0 | 0 | 1435 | 830 | 2012 | 0 | 0 | 0 |
| HCT-114-1 | | | | | | | [symbol] | 0 | 0 | 0 | 1106 | 330 | 20773 | 1648 | 786 | 0 |
| HCT-115-2 | | | | | | | [symbol] | 0 | 0 | 0 | 2982 | 2935 | [symbol] | 148 | 811 | 0 |
| HT [symbol] -2 | | | | | | | [symbol] | 0 | 0 | 0 | 1014 | 2541 | 8264 | [symbol] | 0 | 0 |
| [symbol] -1 | | | | | | | [symbol] | 0 | 0 | 0 | 213 | 3130 | 1816 | 0 | 647 | 0 |
| [symbol] -2 | | | | | | | [symbol] | 0 | 0 | 0 | 819 | 5647 | 1019 | 793 | 179 | 0 |
| [symbol] - [symbol] -1 | | | | | | | [symbol] | 0 | 0 | 0 | 2143 | 3277 | 744 | 875 | 0 | 0 |
| [symbol] - [symbol] -2 | | | | | | | [symbol] | 0 | 0 | 0 | 326 | 5072 | 4430 | 2855 | 1204 | 0 |
| OVCAR-4-1 | | | | | | | [symbol] | 0 | 0 | 0 | 1664 | 2823 | 4847 | 25 | 867 | 0 |
| OVCAR-4-2 | | | | | | | [symbol] | 0 | 0 | 0 | 0 | 1824 | 19130 | 406 | 441 | 0 |
| OVCAR-5-1 | | | | | | | [symbol] | 0 | 0 | 0 | 1143 | 6553 | 13774 | 483 | 330 | 0 |
| OVCAR-5-2 | | | | | | | [symbol] | 0 | 0 | 0 | 1268 | 3797 | [symbol] | 875 | 0 | 0 |
| MCF-7-2 | | | | | | | [symbol] | 0 | 0 | 0 | 768 | 3082 | 1725 | 294 | 0 | 0 |
| ADA-RES-2 | | | | | | | [symbol] | 0 | 0 | 0 | 776 | 1953 | 0 | 0 | 44 | 0 |
| [symbol] -2 | | | | | | | [symbol] E4 | 0 | 0 | 0 | 841 | 1916 | 845 | 1522 | 0 | 0 |
| SW480-1 | | | | | | | [symbol] | 0 | 0 | 0 | 424 | 1870 | 4717 | [symbol] | [symbol] | 0 |
| SW480-2 | | | | | | | [symbol] | 0 | 0 | 0 | 1306 | 702 | 6413 | 0 | [symbol] | 0 |
| HT [symbol] -2 | | | | | | | [symbol] | 0 | 0 | 0 | 283 | 0 | 2907 | 1014 | 340 | 0 |
| C33A-1 | | | | | | | [symbol] | 0 | 0 | 0 | 205 | 4364 | 2016 | 131 | 440 | 0 |
| C33A-2 | | | | | | | [symbol] | 0 | 0 | 0 | 204 | 1142 | 0 | 380 | 373 | 0 |
| U [symbol] -1 | | | | | | | [symbol] | 0 | 0 | 0 | 2048 | 7970 | [symbol] | 443 | 3787 | 0 |
| U [symbol] -2 | | | | | | | [symbol] | 0 | 0 | 0 | 6100 | 11304 | 7073 | 1903 | [symbol] | 0 |
| M [symbol] -1 | | | | | | | [symbol] | 0 | 0 | 0 | 1432 | 4561 | 3320 | 0 | [symbol] | 0 |
| M [symbol] -2 | | | | | | | [symbol] | 0 | 0 | 0 | 0 | 1963 | 8724 | 283 | 0 | 0 |
| W1 [symbol] -2 | | | | | | | [symbol] | 0 | 0 | 0 | 2204 | [symbol] | 2835 | 442 | 18 | 0 |
| [symbol] -1 | | | | | | | | 0 | 0 | 0 | 1156 | 3176 | 9771 | 244 | 0 | 0 |
| [symbol] -2 | | | | | | | | 0 | 0 | 0 | 4485 | 2091 | 0 | 404 | 0 | 0 |
| [symbol] -3 | | | | | | | | 0 | 0 | 0 | 6430 | 11049 | 0 | 0 | 1371 | 0 |
| [symbol] -4 | | | | | | | | 0 | 0 | 0 | 6660 | 41955 | 13408 | 0 | 1037 | 0 |
| [symbol] -5 | | | | | | | | 0 | 0 | 0 | 4520 | 2081 | 4204 | 282 | 0 | 0 |
| [symbol] -6 | | | | | | | | 0 | 0 | 0 | 1704 | 340 | 0 | 143 | 0 | 0 |
| [symbol] -7 | | | | | | | | 0 | 0 | 0 | 3347 | 131 | 314 | 4175 | 110 | 0 |
| [symbol] -8 | | | | | | | | 0 | 0 | 0 | 48 | 21722 | 273 | 603 | 0 | 0 |
| [symbol] | | | | | | | | 0 | 0 | 0 | [symbol] | 8479 | [symbol] | 2724 | [symbol] | 0 |
| [symbol] | | | | | | | | 0 | 0 | 0 | [symbol] | [symbol] | [symbol] | [symbol] | [symbol] | 0 |
| [symbol] | | | | | | | | 0 | 0 | 0 | 8122 | 1300 | [symbol] | 1311 | [symbol] | 0 |
| [symbol] | | | | | | | | 0 | 0 | 0 | [symbol] | [symbol] | 14381 | 1851 | [symbol] | 0 |
| [symbol] | | | | | | | | 0 | 0 | 0 | 3087 | 3288 | [symbol] | 1028 | 0 | 0 |
| [symbol] | | | | | | | | 0 | 0 | 0 | [symbol] | 298 | [symbol] | 311 | 238 | 0 |
| [symbol] | | | | | | | | 0 | 0 | 0 | 3041 | 12534 | 1781 | 833 | [symbol] | 0 |
| [symbol] | | | | | | | | 0 | 0 | 0 | 4794 | 2846 | 2872 | 2303 | 4773 | 0 |
| [symbol] | | | | | | | | 0 | 0 | 0 | 1944 | 4731 | 97 | [symbol] | 933 | 0 |
| [symbol] | | | | | | | | 0 | 0 | 0 | [symbol] | [symbol] | 231 | 1117 | [symbol] | 0 |
| [symbol] | | | | | | | | 0 | 0 | 0 | 12057 | 5346 | 0 | [symbol] | [symbol] | 0 |
| [symbol] | | | | | | | [symbol] | 0 | 0 | 0 | 0 | 1444 | [symbol] | 0 | 427 | 0 |
| [symbol] | | | | | | | [symbol] | 0 | 0 | 0 | 1913 | 2753 | [symbol] | [symbol] | 17 | 0 |
| [symbol] | | | | | | | [symbol] | 0 | 0 | 0 | 742 | 2307 | 2043 | [symbol] | 819 | 0 |
| [symbol] | | | | | | | [symbol] | 0 | 0 | 0 | 614 | 8117 | 2307 | 761 | 0 | 0 |
| HC29-1 | | | | | | | [symbol] | 0 | 0 | 0 | 429 | 2044 | [symbol] | [symbol] | 0 | 0 |
| HT29-7 | | | | | | | [symbol] | 0 | 0 | 0 | 444 | 130 | 8 | 0 | 101 | 0 |
| HT29-3 | | | | | | | [symbol] | 0 | 0 | 0 | [symbol] | 2808 | 2171 | 0 | 1144 | 0 |
| [symbol] | | | | | | | [symbol] | 0 | 0 | 0 | 0 | 4143 | [symbol] | 1075 | [symbol] | 0 |
| [symbol] | | | | | | | [symbol] | 0 | 0 | 0 | [symbol] | [symbol] | 2822 | 102 | 0 | 0 |
| [symbol] | | | | | | | [symbol] | 0 | 0 | 0 | 771 | 0001 | 2712 | 1138 | 1044 | 0 |
| [symbol] | | | | | | | [symbol] | 0 | 0 | 0 | 1100 | 4034 | 0022 | 384 | 0 | 0 |
| [symbol] | | | | | | | [symbol] | 0 | 0 | 0 | 0 | 1294 | 8343 | 0 | 0 | 0 |
| [symbol] | | | | | | | [symbol] | 0 | 0 | 0 | 2050 | 2100 | 13038 | [symbol] | 3734 | 0 |
| [symbol] | | | | | | | [symbol] | 0 | 0 | 0 | 0 | 947 | 21830 | 0 | 0 | 0 |
| [symbol] | | | | | | | [symbol] | 0 | 0 | 0 | [symbol] | 2833 | 7100 | 2343 | 0 | 0 |
| [symbol] | | | | | | | [symbol] | 0 | 0 | 0 | 0 | 2474 | 6221 | 0 | 180 | 0 |
| [symbol] | | | | | | | [symbol] | 0 | 0 | 0 | [symbol] | 872 | 3321 | 0 | 0 | 0 |
| [symbol] | | | | | | | [symbol] | 0 | 0 | 0 | 1823 | 225 | 4703 | 9410 | 0 | 0 |
| [symbol] | | | | | | | [symbol] | 0 | 0 | 0 | 209 | 841 | [symbol] | 0 | 1427 | 0 |
| [symbol] | | | | | | | [symbol] | 0 | 0 | 0 | 0 | 870 | 4328 | 0 | 1188 | 0 |
| [symbol] | | | | | | | [symbol] | 0 | 0 | 0 | 1405 | 4781 | 2095 | 291 | 40 | 0 |
| [symbol] | | | | | | | [symbol] | 0 | 0 | 0 | 0 | 3029 | 2718 | 1022 | 837 | 0 |
| [symbol] | | | | | | | [symbol] | 0 | 0 | 0 | 0 | 8683 | 481 | 003 | 0 | 0 |
| [symbol] | | | | | | | [symbol] | 0 | 0 | 0 | 22351 | [symbol] | 3016 | 377 | 1215 | 0 |
| [symbol] | | | | | | | [symbol] | 0 | 0 | 0 | 31 | 4840 | 8315 | 0 | 0 | 0 |
| [symbol] | | | | | | | [symbol] | 0 | 0 | 0 | 1025 | 345 | 3156 | 144 | 0 | 0 |
| [symbol] | | | | | | | [symbol] | 0 | 0 | 0 | 1406 | 1183 | 2374 | 1002 | 0 | 0 |
| w128-6 | | | | | | | [symbol] | 0 | 0 | 0 | 1470 | 0 | 2574 | 0 | 0 | 0 |
| [symbol] | | | | | | | | 27529 | 0 | 4416 | 270 | 299 | 1447 | 6182 | 0 | 0 |
| [symbol] | | | | | | | | 25566 | 874 | 734 | 343 | 4685 | 27 | 673 | 15 | 84 |
| [symbol] | | | | | | 84 | | 34410 | 0 | 0 | 1007 | 3021 | 1562 | 0 | 228 | 0 |
| MT363 | | | | | | | | 30019 | 0 | 0 | 7007 | 21100 | 3573 | 25 | 0 | 301 |
| MT376 | | | | | | | | 37529 | 8 | 386 | 836 | 2000 | 9814 | 0 | 0 | 0 |
| MT205 | | | | | | | | 76812 | 0 | 0 | 14370 | 8054 | 1358 | 318 | 0 | 0 |
| MT206 | | | | | | | | 21786 | 831 | 0 | 0 | 32309 | 1103 | 185 | 973 | 574 |
| [symbol] | | | | | | 173 | | 38821 | 38 | 0 | 0 | [symbol] | 1010 | 75 | 175 | 0 |
| [symbol] | | | | | | 173 | | 18050 | 0 | 8 | 0 | 311 | 43 | 0 | 171 | 10 |
| [symbol] | | | | | | 177 | | 20075 | 0 | 143 | 203 | 0 | 643 | 0 | 418 | 110 |
| [symbol] | | | | | | | | 83377 | 0 | 0 | 3349 | 345 | 48 | 0 | 1700 | 0 |
| [symbol] | | | | | | 237 | | 48162 | 287 | 0 | 345 | 733 | 2244 | 400 | 105 | 0 |
| WTB-10 | | | | | | | | 40798 | 0 | 0 | 1379 | 3583 | 0 | 0 | 0 | 0 |
| [symbol] | | | | | | | | 44314 | 44 | 0 | 0 | 4810 | 70 | 0 | 261 | 0 |
| [symbol] | | | | | | | | 25725 | 7 | 8 | 0 | 8783 | 14 | 0 | 0 | 0 |
| [symbol] | | | | | | | | 24878 | 238 | 1075 | 2502 | 2701 | 1321 | 1048 | 9 | 0 |
| [symbol] | | | | | | | | 37087 | 0 | 0 | 10708 | 3881 | 674 | 0 | 0 | 0 |
| [symbol] | | | | | | | | 32134 | 0 | 281 | 17028 | 10117 | 476 | 1002 | 843 | 403 |
| MCT-115-3 | | | | | | | [symbol] | 0 | 0 | 0 | 11 | 1783 | 4484 | 207 | 24 | 0 |
| MCT-115-4 | | | | | | | [symbol] | 0 | 0 | 0 | 0 | 2318 | 7079 | 113 | 0 | 0 |
| MCT-116-6 | | | | | | | [symbol] | 0 | 0 | 0 | 1700 | 1800 | 3347 | 0 | 0 | 0 |
| MCT-116-8 | | | | | | | [symbol] | 0 | 0 | 0 | [symbol] | 2878 | 7519 | 207 | 248 | 0 |
| A545-5 | | | | | | | [symbol] | 0 | 0 | 0 | 0 | 2704 | 52 | 0 | 302 | 0 |
| MT29-3 | | | | | | | [symbol] | 0 | 0 | 0 | 148 | 4024 | 7874 | 1143 | 813 | 0 |
| [symbol] | | | | | | | [symbol] | 0 | 0 | 0 | 0 | 1848 | 2374 | 0 | 435 | 0 |
| MT29-4 | | | | | | | [symbol] | 0 | 0 | 0 | 1228 | 323 | 3223 | 181 | 0 | 0 |
| MT29-5 | | | | | | | [symbol] | 0 | 0 | 0 | 1070 | 3885 | 3007 | 0 | 383 | 0 |
| MT29-6 | | | | | | | [symbol] | 0 | 0 | 0 | 0 | 2000 | 8478 | 108 | 1056 | 0 |
| OVCAR-4-3 | | | | | | | [symbol] | 0 | 0 | 0 | 1203 | 1513 | 11854 | 079 | 800 | 0 |
| OVCAR-4-4 | | | | | | | [symbol] | 0 | 0 | 0 | 0 | 700 | 8721 | 0 | 3000 | 0 |
| OVCAR-4-5 | | | | | | | [symbol] | 0 | 0 | 0 | [symbol] | 3034 | 13754 | 1750 | 294 | 0 |
| OVCAR-4-6 | | | | | | | [symbol] | 0 | 0 | 0 | 813 | 10574 | 2375 | 211 | 786 | 0 |
| SF [symbol] -3 | | | | | | | [symbol] | 0 | 0 | 0 | 1203 | 4100 | 1572 | 158 | 108 | 0 |
| SF [symbol] -4 | | | | | | | [symbol] | 0 | 0 | 0 | 0 | 1003 | 3754 | 0 | 0 | 0 |
| SF [symbol] -5 | | | | | | | [symbol] | 0 | 0 | 0 | [symbol] | 2893 | 2303 | 414 | 504 | 0 |
| SF [symbol] -6 | | | | | | | [symbol] | 0 | 0 | 0 | [symbol] | 4180 | 0 | 540 | 111 | 0 |
| OVCAR-3 | | | | | | | [symbol] | 0 | 0 | 0 | 1547 | 6437 | 7120 | 0 | 400 | 0 |
| OVCAR-4 | | | | | | | [symbol] | 0 | 0 | 0 | 0 | 3700 | 3410 | 28 | 0 | 0 |
| OVCAR-5 | | | | | | | [symbol] | 0 | 0 | 0 | 234 | 208 | 1823 | 13 | 0 | 0 |
| OVCAR-6 | | | | | | | [symbol] | 0 | 0 | 0 | 634 | [symbol] | 2247 | 433 | 718 | 0 |
| ADR- [symbol] | | | | | | | [symbol] | 0 | 0 | 0 | 0 | 2828 | 2854 | 94 | 162 | 0 |
| MCF-7-6 | | | | | | | [symbol] | 0 | 0 | 0 | 1327 | 1664 | 4791 | 128 | 0 | 0 |
| M [symbol] | | | | | | | [symbol] | 0 | 0 | 0 | [symbol] | 1994 | 372 | 0 | [symbol] | 0 |
| SW200-5 | | | | | | | [symbol] | 0 | 0 | 0 | 0 | 0 | 2309 | 283 | 0 | 0 |
| SW400-3 | | | | | | | [symbol] | 0 | 0 | 0 | 0 | 058 | 3879 | 303 | 2519 | 0 |
| SW400-4 | | | | | | | [symbol] | 0 | 0 | 0 | [symbol] | 377 | 4245 | 300 | 1054 | 0 |
| SW400-5 | | | | | | | [symbol] | 0 | 0 | 0 | 2315 | 1275 | 4525 | 10 | 14325 | 0 |
| SW400- [symbol] | | | | | | | [symbol] | 0 | 0 | 0 | 1702 | 1026 | 1983 | [symbol] | 1577 | 0 |
| C33A-2 | | | | | | | [symbol] | 0 | 0 | 0 | 0 | 0 | 451 | 0 | 294 | 0 |
| C33A-4 | | | | | | | [symbol] | 0 | 0 | 0 | 72 | 775 | 0 | 9 | 808 | 0 |
| C33A-6 | | | | | | | [symbol] | 0 | 0 | 0 | 0 | 5457 | 21373 | 9 | 0 | 0 |
| C33A-4 | | | | | | | [symbol] | 0 | 0 | 0 | 0 | 10 | 8473 | 0 | 0 | 0 |
| [symbol] | | | | | | | [symbol] | 0 | 0 | 0 | 573 | 41 | 8821 | 2851 | 764 | 0 |
| [symbol] -3 | | | | | | | [symbol] | 0 | 0 | 0 | 1430 | 11023 | [symbol] | 10043 | 1183 | 0 |
| [symbol] -4 | | | | | | | [symbol] | 0 | 0 | 0 | 1190 | 8148 | [symbol] | 1918 | 2063 | 0 |
| [symbol] -5 | | | | | | | [symbol] | 0 | 0 | 0 | 1754 | 6154 | 2500 | 0 | 2300 | 0 |
| [symbol] -6 | | | | | | | [symbol] | 0 | 0 | 0 | [symbol] | 17007 | 318 | [symbol] | 219 | 0 |
| [symbol] -4 | | | | | | | [symbol] | 0 | 0 | 0 | 1629 | 2315 | 2548 | [symbol] | 0 | 0 |
| [symbol] -3 | | | | | | | [symbol] | 0 | 0 | 0 | [symbol] | 0007 | 7181 | 105 | 278 | 0 |
| [symbol] -4 | | | | | | | [symbol] | 0 | 0 | 0 | 27 [symbol] | 1182 | 20533 | 1017 | 0 | 0 |
| SF- [symbol] | | | | | | | [symbol] | 0 | 0 | 0 | 1124 | 6180 | 6431 | 0 | 0 | 0 |
| SF-299-4 | | | | | | | [symbol] | 0 | 0 | 0 | 1417 | 2982 | 6331 | 1674 | 22 | 0 |
| SF- [symbol] | | | | | | | [symbol] | 0 | 0 | 0 | 1834 | 3020 | 3241 | 0 | 9 | 0 |
| SF- [symbol] | | | | | | | [symbol] | 0 | 0 | 0 | 1514 | 4288 | 84 | 402 | 0 | 0 |
| [symbol] -13 | | | | | | | | 0 | 0 | 0 | 5018 | 12523 | 12085 | [symbol] | 0005 | 0 |
| [symbol] -20 | | | | | | | | 0 | 0 | 0 | 4071 | 10817 | 13500 | [symbol] 47 | 7180 | 0 |
| [symbol] -21 | | | | | | | | 0 | 0 | 0 | 2612 | 4067 | 7000 | [symbol] | 2787 | 0 |
| [symbol] -22 | | | | | | | | 0 | 0 | 0 | [symbol] | 3314 | 2833 | 7314 | 681 | 0 |
| OVCAR-5 | | | | | | | [symbol] | 0 | 0 | 0 | 4 [symbol] | 8671 | 4413 | 200 | 2240 | 0 |
| [symbol] -10 | | | | | | | | 0 | 0 | 0 | 3474 | 838 | 478 | 143 | 4303 | 0 |
| [symbol] -11 | | | | | | | | 0 | 0 | 0 | 2220 | 0 | 12 | 205 | 4983 | 0 |
| [symbol] -12 | | | | | | | | 0 | 0 | 0 | 1477 | 2702 | 1025 | 812 | 17000 | 0 |
| [symbol] -13 | | | | | | | | 0 | 0 | 0 | 1770 | 11411 | 1101 | 2922 | 251 | 0 |
| [symbol] -14 | | | | | | | | 0 | 0 | 0 | 3018 | 0 | 0 | 3030 | 61 | 0 |
| [symbol] -15 | | | | | | | | 0 | 0 | 0 | 1200 | 13215 | 645 | 747 | 4236 | 0 |
| [symbol] -16 | | | | | | | | 0 | 0 | 0 | 1737 | 902 | 4334 | 420 | [symbol] | 0 |
| [symbol] -17 | | | | | | | | 0 | 0 | 0 | 2243 | 14 | 0 | 573 | 433 | 0 |
| [symbol] -18 | | | | | | | | 0 | 0 | 0 | 3478 | [symbol] | 4281 | 1120 | 502 | 0 |
| [symbol] -19 | | | | | | | | 0 | 0 | 0 | 1934 | 12800 | 4418 | 653 | 1028 | 0 |
| [symbol] | | 1 | | | | | | 18824 | 0 | 236 | 184 | 1815 | 2243 | 1782 | [symbol] | [symbol] |
| [symbol] | | 2 | | | | | | 2314 | 0 | 262 | 384 | 2374 | 1794 | [symbol] | [symbol] | [symbol] |
| [symbol] | | 3 | | | | | | 1 [symbol] | 0 | 237 | 0 | [symbol] | [symbol] | 1381 | 1112 | 42217 |
| [symbol] | | 4 | | | | | | 441 | 0 | 0 | 0 | 2706 | 1043 | [symbol] | 0 | 2239 |
| [symbol] | | 5 | | | | | | 4 [symbol] | 0 | 100 | 234 | 1426 | [symbol] | [symbol] | 11234 | 31129 |
| [symbol] | | 6 | | | | | | 3 [symbol] | 0 | 0 | 344 | [symbol] 76 | 3342 | [symbol] | 8722 | 44330 |
| [symbol] | | 7 | | | | | | [symbol] | 0 | 30 | 0 | [symbol] | [symbol] | 3100 | 13783 | [symbol] |
| [symbol] | | 8 | | | | | | 15879 | 0 | 82 | 231 | 4629 | 8387 | 232 | 32283 | [symbol] |
| [symbol] | | 9 | | | | | | 52149 | 0 | 253 | [symbol] | 1743 | [symbol] | 2001 | [symbol] | [symbol] |
| [symbol] | | 10 | | | | | | 4434 | 0 | 51 | 87 | 1183 | 2209 | 2312 | 41000 | 33000 |
| [symbol] | | 11 | | | | | | 2337 | 0 | 223 | 0 | 1334 | [symbol] | 1334 | 30344 | [symbol] |
| [symbol] | | 12 | | | | | | 2083 | 0 | 114 | 0 | [symbol] | 3783 | 1334 | [symbol] | 21152 |
| [symbol] | | 13 | | | | | | 2878 | 0 | 103 | 100 | [symbol] | [symbol] | 334 | 4384 | 42100 |
| [symbol] | | 14 | | | | | | 0 | 0 | 138 | 0 | [symbol] | 3419 | 119 | 1431 | 20023 |
| [symbol] | | 15 | | | | | | [symbol] | 0 | 218 | 348 | 10713 | 4379 | 1129 | [symbol] | [symbol] |
| [symbol] | | 16 | | | | | | [symbol] | 0 | 0 | 0 | [symbol] | 1942 | 1183 | 2004 | 14412 |
| [symbol] | | 17 | | | | | | [symbol] 42 | 0 | [symbol] | 181 | 1123 | 472 | 1022 | 2810 | 14747 |
| [symbol] | | 18 | | | | | | 37 [symbol] | 0 | [symbol] | 144 | 2037 | [symbol] | 443 | 4172 | 22300 |
| [symbol] | | 19 | | | | | | 0 | 0 | 181 | 223 | [symbol] | [symbol] | 431 | 70 [symbol] | [symbol] |
| [symbol] | | 20 | | | | | | 0 | 0 | 134 | 0 | [symbol] | [symbol] | 272 | [symbol] | [symbol] |
| [symbol] | | 21 | | | | | | 8348 | 0 | 0 | 0 | [symbol] | 0 | 281 | 0 | [symbol] |
| [symbol] | | 22 | | | | | | 2383 | 0 | 0 | 184 | 1447 | 3300 | 831 | [symbol] | [symbol] |
| [symbol] | | 23 | | | | | | 2011 | 0 | 104 | 177 | [symbol] | 2134 | 473 | 3434 | 20017 |
| [symbol] | | 24 | | | | | | [symbol] 2 | 0 | 125 | 0 | [symbol] | 412 | 231 | 1243 | 17007 |
| [symbol] | | 25 | | | | | | [symbol] 45 | 0 | 1100 | 200 | [symbol] | [symbol] | 11004 | [symbol] | 48517 |
| [symbol] | | 27 | | | | | | 1202 | 0 | 47 | 23 | [symbol] | [symbol] | 1430 | 11400 | 85005 |
| [symbol] | | 28 | | | | 28 | | 384 | 0 | 0 | [symbol] | [symbol] | 0 | 0 | 0 | 1074 |
| [symbol] | | 29 | | | | | | [symbol] 25 | 0 | 134 | 0 | 1324 | 1000 | 234 | 3454 | 21000 |
| [symbol] | | 30 | | | | 30 | | 100 | 0 | 11 | [symbol] | 4134 | [symbol] | 84 | 0 | [symbol] |
| [symbol] | | 31 | | | | | | 3411 | 0 | 17 | 0 | 4408 | 4182 | 1387 | [symbol] | [symbol] |
| [symbol] | | 32 | | | | | | 0 | 0 | 33 | [symbol] | 1237 | 144 | 19 | 383 | [symbol] |
| [symbol] | | 33 | | | | | | 3091 | 0 | 42 | 307 | 1237 | 1343 | 1200 | 1300 | 38300 |
| [symbol] | | 34 | | | | | | 194 | 0 | 20 | 70 | 1731 | [symbol] | 278 | [symbol] | [symbol] |
| [symbol] | | 35 | | | | | | 179 | 0 | 0 | 0 | 1300 | 0 | 0 | 1 | 21419 |
| [symbol] | | 36 | | | | | | [symbol] | 0 | 114 | 0 | 1323 | [symbol] | 182 | [symbol] | [symbol] |
| [symbol] | | 37 | | | | | | [symbol] | 0 | 14 | 0 | 2413 | 0 | 31 | 0 | 2343 |
| [symbol] | | 38 | | | | | | [symbol] 223 | 0 | 8 | 0 | [symbol] | 1072 | 134 | 0 | [symbol] |
| [symbol] | | 39 | | | | | | [symbol] | 0 | 17 | 33 | [symbol] | [symbol] | 0 | 0 | 2701 |
| [symbol] | | 40 | | | | | | 100 | 0 | 0 | [symbol] | 4023 | [symbol] | 0 | 0 | [symbol] |
| [symbol] | | 41 | | | | | | 92 | 0 | 0 | 0 | 2089 | 0 | 0 | 0 | 2873 |
| [symbol] | | 42 | | | | | | 11823 | 0 | 0 | 0 | [symbol] | [symbol] | 142 | 0 | [symbol] |
| [symbol] | | 43 | | | | | | 0 | 0 | 0 | 407 | 1511 | 1427 | 0 | 0 | [symbol] |
| [symbol] | | 44 | | | | | | 1132 | 0 | 27 | 83 | [symbol] | [symbol] | 118 | [symbol] | 22783 |
| [symbol] | | | | | 343 | | | 871 | 0 | 0 | 0 | [symbol] | 0 | 0 | 0 | 0 |
| [symbol] | | | | | 343 | | | 0 | 0 | 0 | 0 | 295 | 0 | 32 | 0 | 482 |
| [symbol] | | | | | 351 | | | 2134 | 0 | 0 | 47 | 1307 | 387 | 21 | 0 | [symbol] |
| [symbol] | | | | | 3 [symbol] | 356 | | 1100 | 0 | 0 | 403 | 1430 | 2007 | [symbol] | 0 | [symbol] |
| [symbol] | | | | | 334 | 334 | | [symbol] 27 | 0 | 49 | 0 | 1405 | 384 | [symbol] | 334 | 2334 |
| [symbol] | | | | | 344 | | | 0 | 0 | 11 | 0 | 1862 | 487 | 00 | 200 | 1728 |
| [symbol] | | | | | 342 | | | 0 | 0 | 0 | 0 | 1829 | 1170 | 0 | 234 | 7342 |
| [symbol] | | | | | 334 | 334 | | 0 | 0 | 0 | 209 | [symbol] | 117 | 0 | 0 | 0 |
| [symbol] | | | | | 332 | | | 2714 | 0 | 0 | 0 | 4034 | 0 | 421 | 0 | 27819 |
| [symbol] | | | | | 3 [symbol] | | | 0 | 0 | 0 | 324 | 4482 | 0 | [symbol] | 0 | 191 |
| [symbol] | | | | | 334 | | | 3524 | 0 | 200 | 10 | [symbol] | 20 | [symbol] | 4380 | 13417 |
| [symbol] | | | | | 327 | | | 0 | 0 | 114 | 378 | 4437 | 0 | 0 | 42 | 400 |
| [symbol] | | | | | 3 [symbol] | | | 2912 | 0 | 0 | 230 | 1683 | 0 | 423 | 347 | [symbol] |
| [symbol] | | | | | 321 | | | 240 | 0 | 0 | 0 | 3430 | 0 | 0 | 0 | 1102 |
| [symbol] | | | | | 320 | | | 1442 | 0 | 0 | 0 | 3421 | 0 | 0 | 0 | 3447 |
| [symbol] | | | | | 318 | | | 3528 | 0 | 313 | 0 | [symbol] | 4543 | 0 | 0 | [symbol] |
| [symbol] | | | | | 316 | | | 1424 | 0 | 20 | 184 | 4057 | 2227 | 187 | [symbol] | [symbol] |
| [symbol] | | | | | 314 | | | 3099 | 0 | 220 | 175 | 1272 | 443 | 343 | [symbol] | [symbol] |
| [symbol] | | | | | 311 | | | 0 | 0 | 84 | 0 | [symbol] | 410 | 27 | 0 | 17721 |
| [symbol] | | | | | 309 | | | 230 | 0 | 0 | 0 | 1414 | 700 | 0 | 0 | [symbol] |
| [symbol] | | | | | 307 | | | 0 | 0 | 0 | 370 | 3424 | 0 | [symbol] | 1841 | [symbol] |
| [symbol] | | | | | 305 | | | 0 | 0 | 34 | 260 | 4133 | 2282 | [symbol] | 1000 | [symbol] |
| [symbol] | | | | | 303 | | | 3 [symbol] | 0 | 382 | 53 | 8370 | 4071 | 04 | 0 | 37185 |
| [symbol] | | | | | [symbol] | | | [symbol] | 0 | 376 | 164 | [symbol] | [symbol] | 145 | [symbol] | [symbol] |
| [symbol] | | | | | 2 [symbol] | | | [symbol] 378 | 0 | 233 | 64 | [symbol] | [symbol] | [symbol] | 2087 | [symbol] |
| [symbol] | | | | | 207 | | | 3054 | 0 | 0 | 434 | 4472 | 0 | 44 | 1583 | 30382 |
| [symbol] | | | | | 2 [symbol] | | | 248 | 0 | 134 | 0 | 3416 | 3028 | 0 | 482 | [symbol] |
| [symbol] | | | | | 234 | | | 0 | 0 | [symbol] | 0 | [symbol] | 2048 | 304 | 543 | 20075 |
| [symbol] | | | | | 242 | | | 221 | 0 | [symbol] | 0 | 2032 | [symbol] | 178 | 134 | 18371 |
| [symbol] | | | | | 2 [symbol] | | | [symbol] 03 | 0 | 245 | 0 | 12 | [symbol] | 54 | 124 | 40024 |
| [symbol] | | | | | 279 | | | 0 | 0 | [symbol] | 234 | 1440 | 114 | 0 | 303 | 1531 |
| [symbol] | | | | | 277 | | | 100 | 0 | 0 | 0 | 4734 | 1182 | 0 | 1304 | 10122 |
| [symbol] | | | | | 275 | 275 | | 0 | 0 | [symbol] 1 | 181 | 3704 | 474 | 83 | 0 | 0 |
| [symbol] | | | | | 2 [symbol] | | | 0 | 0 | 7 | 0 | [symbol] | 242 | 434 | 0 | 6225 |
| [symbol] | | | | | 2 [symbol] | | | 1297 | 0 | 0 | 116 | [symbol] | 383 | 84 | 474 | 11174 |
| [symbol] | | | | | 236 | 236 | | 0 | 0 | 100 | 0 | [symbol] | 7082 | 0 | 1824 | 13782 |
| [symbol] | | | | | 235 | 235 | | 83 | 0 | 134 | 0 | [symbol] | [symbol] | 0 | 52 | 4342 |
| [symbol] | | | | | 234 | | | 0 | 0 | 0 | 0 | [symbol] | 142 | 160 | 0 | 2417 |
| [symbol] | | | | | 233 | 233 | | [symbol] 71 | 0 | 47 | 0 | [symbol] | 0 | 0 | 0 | 1131 |
| [symbol] | | | | | 231 | 231 | | 0 | 0 | 130 | 100 | 4134 | 2231 | 110 | 417 | 1492 |
| [symbol] | | | | | 229 | 229 | | 0 | 0 | [symbol] | 100 | 3310 | 4000 | 112 | 0 | 1100 |
| [symbol] | | | | | 227 | 227 | | 0 | 0 | 187 | 8 | 4156 | 117 | 0 | 0 | 4183 |
| [symbol] | | | | | 222 | | | 0 | 0 | 14 | 3 | 5439 | 0 | 83 | 0 | 1054 |
| [symbol] | | | | | 218 | | | 18777 | 0 | 0 | 124 | 2347 | 0 | 0 | 434 | [symbol] |
| [symbol] | | | | | 214 | | | 1984 | 0 | 41 | 143 | [symbol] | 1000 | 0 | 138 | 33000 |
| [symbol] | | | | | 213 | | | 0 | 0 | [symbol] | 70 | 3333 | 0 | 132 | 0 | [symbol] |
| [symbol] | | | | | 212 | | | [symbol] | 0 | 0 | 77 | 1011 | 1004 | 134 | 17 | 18058 |
| [symbol] | | | | | 211 | 211 | | 107 | 0 | 0 | 0 | 1206 | 241 | 0 | 0 | 149 |
| [symbol] | | | | | 210 | | | [symbol] 2 | 0 | 113 | 0 | 1400 | 4313 | 100 | 001 | [symbol] |
| [symbol] | | | | | 209 | | | 30 | 0 | 11 | 0 | 2424 | 3335 | 34 | 104 | 316 |
| [symbol] | | | | | 289 | | | [symbol] | 0 | 0 | 172 | 4207 | 0 | 0 | 0 | 3834 |
| [symbol] | | | | | [symbol] | | | 1319 | 0 | 0 | 0 | 2439 | 0 | 110 | 0 | 270 |
| [symbol] | | | | | 201 | | | 182 | 0 | 29 | 0 | 2170 | [symbol] | 0 | 0 | 4131 |
| [symbol] | | | | | 1 [symbol] | | | 204 | 0 | 11 | 0 | [symbol] | 0 | 20 | 0 | [symbol] |
| [symbol] | | | | | 137 | | | 180 | 0 | 11 | 0 | 2207 | [symbol] | 12 | 4200 | [symbol] |
| [symbol] | | | | | 186 | | | 0 | 0 | [symbol] 4 | 0 | 1347 | 174 | 42 | 23 | 1813 |
| [symbol] | | | | | 183 | | | 110 | 0 | 13 | 0 | 2304 | [symbol] | 11 | 0 | 20071 |
| [symbol] | | | | | 178 | | | 0 | 0 | 0 | 0 | 1139 | 0 | 0 | 400 | 10 |
| [symbol] | | | | | 81 | | | 0 | 0 | 0 | [symbol] | [symbol] | [symbol] | 0 | 0 | [symbol] |
| [symbol] | | | | | [symbol] | | | 1428 | 0 | 0 | 0 | [symbol] | 1000 | 0 | 0 | [symbol] |
| [symbol] | | | | | [symbol] 7 | | | [symbol] | 0 | 0 | 0 | 4477 | 2000 | 24 | 384 | 23334 |
| [symbol] | | | | | [symbol] 4 | | | 242 | 0 | [symbol] 4 | 0 | [symbol] | 241 | 70 | 0 | 8333 |
| [symbol] | | | | | [symbol] 3 | | | 0 | 0 | 0 | 0 | 1711 | 142 | 0 | 137 | 410 |
| [symbol] | | | | | [symbol] 1 | | | 174 | 0 | 23 | 242 | 2021 | 2134 | 0 | 187 | [symbol] |
| [symbol] | | | | | [symbol] | | | 0 | 0 | [symbol] | 0 | 3843 | 824 | 0 | 81 | 12023 |
| [symbol] | | | | 79 | | | | 0 | 0 | 0 | 70 | 4670 | 341 | 0 | 0 | 37319 |
| [symbol] | | | | 81 | | | | 0 | 0 | 42 | 2700 | 4053 | 237 | 0 | 31 | 3014 |
| [symbol] | | | | 83 | | | | 143 | 0 | [symbol] | 0 | [symbol] | 4007 | 0 | 288 | 1371 |
| [symbol] | | | | [symbol] | | | | [symbol] | 0 | 30 | 0 | [symbol] | 0 | 0 | 131 | [symbol] |
| [symbol] | | | | [symbol] | | | | 200 | 0 | 0 | 343 | 7318 | 425 | 0 | 0 | [symbol] |
| [symbol] | | | | 90 | | | | 0 | 0 | 183 | 0 | 1780 | 701 | 443 | 0 | [symbol] |
| [symbol] | | | | 82 | | | | 53 | 0 | 70 | 12 | [symbol] 2 | 731 | 43 | 0 | [symbol] |
| [symbol] | | | | 94 | | | | 483 | 0 | 0 | 0 | [symbol] 57 | 0 | 230 | 0 | 1053 |
| [symbol] | | | | [symbol] | | | | [symbol] | 0 | [symbol] | 0 | 4334 | 4121 | 12 | 0 | 1789 |
| [symbol] | | | | 14 [symbol] | | | | [symbol] | 0 | 0 | 0 | 2707 | [symbol] | 0 | [symbol] | [symbol] |
| [symbol] | | | | 14 [symbol] | | | | 22 | 0 | 0 | 183 | 27 [symbol] | 80 | 143 | 1739 | 425 |
| [symbol] | | | | 150 | | | | 0 | 0 | 30 | 0 | 1047 | 1083 | 184 | 730 | 2441 |
| [symbol] | | | | 152 | | | | 2072 | 0 | 0 | 247 | 2284 | 0 | 343 | 3370 | 2024 |
| [symbol] | | | | 154 | | | | [symbol] | 0 | 0 | 0 | 2623 | 1100 | 0 | [symbol] | 3807 |
| [symbol] | | | | 1 [symbol] | | | | 0 | 0 | 42 | 207 | 1432 | 0 | 0 | 114 | 1632 |
| [symbol] | | | | 154 | | | | 0 | 0 | 42 | 570 | 184 | 0 | [symbol] | 1114 | 0 |
| [symbol] | | | | 109 | | | | 0 | 0 | 52 | 149 | 1729 | 1178 | 0 | 0 | 231 |
| [symbol] -143 | | | | 142 | | | | 0 | 0 | 43 | 0 | 1422 | 217 | [symbol] | 1034 | 1800 |
| [symbol] | | | | 184 | | | | 12284 | 0 | 0 | 0 | 1344 | 0 | 183 | 1004 | 4034 |
| C. [symbol] | | | | [symbol] | | | | [symbol] | 0 | 47 | [symbol] | [symbol] 12 | [symbol] | 784 | [symbol] | [symbol] |
| [symbol] | | | | [symbol] | | | | 4017 | 0 | 0 | [symbol] | [symbol] | 04 | 0 | 21342 | [symbol] |
| T-4 [symbol] | | | | 100 | | | | 0 | 0 | 70 | 212 | [symbol] | 73 | [symbol] | [symbol] 531 | 7187 |
| [symbol] 3 | | | | 171 | | | | 0 | 0 | 0 | [symbol] | [symbol] | 373 | 0 | 0 | 241 |
| c [symbol] , 1441 [symbol] 30 | | | | 181 | | | | 0 | 0 | 0 | [symbol] | 13 [symbol] | 130 | 203 | [symbol] | 0 |
| 7817 [symbol] * c [symbol] | | | | 143 | | | | 0 | 0 | 31 | 0 | 447 | 0 | 1 | 212 | 410 |
| KB [symbol] A* | | | | 1 [symbol] 4 | | | | 0 | 0 | 0 | 135 | [symbol] | 24 | 52 | 211 | [symbol] |
| [symbol] poly A* | | | | [symbol] | | | | 282 | 0 | 43 | 0 | 2437 | 0 | [symbol] | [symbol] | 3781 |
| ACI-94 | | | | 124 | | | | 0 | 0 | 0 | 0 | 2832 | 208 | 171 | 8742 | [symbol] |
| UACC-02 | | | | 209 | | | | 304 | 0 | 34 | 131 | 1204 | 0 | 0 | 1277 | 1373 |
| MCF-7 [symbol] | | | | 202 | | | | 0 | 0 | 34 | 0 | 1347 | 700 | 0 | 1434 | 1030 |
| UTOS ( [symbol] | | | | 204 | | | | 0 | 0 | 171 | 22 | 0 | 0 | 0 | 0 | 3433 |
| WISM (C [symbol] A* | | | | 206 | | | | 0 | 0 | 0 | 0 | 742 | 843 | 44 | 42 | 1191 |
| 454 [symbol] | | | | 208 | | | | [symbol] 41 | 0 | 0 | 0 | 7137 | 0 | 0 | 0 | [symbol] |
| CC1, 137 [symbol] | | | | 218 | | | | 0 | 0 | 80 | 141 | 1184 | 3 | 100 | 0 | 8.27 |
| W [symbol] 10% PBS | | | | 219 | | | | 0 | 0 | 0 | 0 | 2120 | 0 | 77 | 0 | [symbol] |
| CR [symbol] 1441 * TFA [symbol] | | | | 220 | | | | 0 | 0 | 0 | 234 | [symbol] | 03 | 0 | 0 | 0 |
| [symbol] -1 | | | | 221 | | | | [symbol] | 0 | 0 | 16 | 1672 | 0 | 0 | 0 | 1347 |
| [symbol] -2 | | | | 223 | | | | 0 | 0 | 0 | 0 | 3225 | 300 | [symbol] | 0 | [symbol] |
| K [symbol] -4 | | | | 224 | | | | 734 | 0 | 172 | 0 | [symbol] | 0 | 0 | 0 | 1331 |
| MCP-02 | | | | 241 | | | | 124 | 0 | 0 | 3 | 1134 | 372 | 0 | 0 | 1724 |
| [symbol] , T-4 | | | | 242 | | | | 1229 | 0 | 0 | 0 | 41 [symbol] | 1234 | 0 | 2 [symbol] 52 | [symbol] |
| DXYX | | | | 243 | | | | [symbol] | 0 | 0 | [symbol] | 2700 | [symbol] | 317 | [symbol] 10 | 1440 |
| L-40 | | | | 244 | | | | 0 | 0 | 0 | 0 | 3432 | [symbol] | 614 | 14 [symbol] | 10317 |
| MC-4423 | | | | 245 | | | | 237 | 0 | [symbol] | 183 | [symbol] | [symbol] | 321 | 3342 | 6330 |
| [symbol] 8226 | | | | [symbol] | | | | 0 | 0 | [symbol] | 413 | 2047 | 711 [symbol] | 182 | 0 | 736 |
| AS [symbol] A TCC | | | | 247 | | | | 0 | 0 | [symbol] | 0 | 2108 | 1 [symbol] 10 | 33 | 241 | [symbol] |
| SA | | | | 248 | | | | 0 | 0 | 0 | 0 | 2709 | 1310 | 23 | 261 | [symbol] |
| CVCAR-3 | | | | 249 | | | | 0 | 0 | 17 | 247 | 3481 | 0 | 41 | 183 | [symbol] 44 |
| MCT-14 | | | | 250 | | | | 1042 | 0 | 0 | 62 | [symbol] | 1387 | 283 | [symbol] | [symbol] |
| OVC [symbol] -4 | | | | 251 | | | | 83 | 0 | 83 | 1 [symbol] | 542 | 0 | 7 | [symbol] | [symbol] 7 |
| UO-31 | | | | 252 | | | | 347 | 0 | 0 | [symbol] | [symbol] | 0 | 0 | [symbol] | 1047 |
| OVCAR-5 | | | | 253 | | | | 0 | 0 | [symbol] | 727 | [symbol] | 0 | 362 | 4789 | [symbol] 32 |
| SM12C | | | | 254 | | | | 811 | 0 | 0 | 0 | 355 [symbol] | [symbol] | 0 | [symbol] | [symbol] |
| OVCAR-4 | | | | 256 | | | | 322 | 0 | 0 | 13 | [symbol] | 872 | 0 | [symbol] | 1742 |
| LOX [symbol] | | | | 25 [symbol] | | | | 0 | 0 | 77 | 343 | 8301 | [symbol] | [symbol] | 2950 | 8100 |
| X3 [symbol] OV1 | | | | 257 | | | | [symbol] | 0 | [symbol] | 0 | [symbol] | [symbol] | 2 | [symbol] | [symbol] 37 |
| SX [symbol] -2 | | | | 258 | | | | 0 | 0 | 176 | 0 | 23 [symbol] | 401 | 338 | 1574 | [symbol] 04 |
| SX-OV-3 | | | | 259 | | | | 0 | 0 | 0 | 0 | 1164 | 0 | 184 | 14 [symbol] | 1437 |
| SX-MEL-4 | | | | 260 | | | | 0 | 0 | 0 | 472 | 1378 | [symbol] | 0 | [symbol] | 14 [symbol] |
| SF- [symbol] | | | | 261 | | | | 1373 | 0 | [symbol] | 434 | [symbol] 73 | 3291 | 0 | 7434 | [symbol] |
| [symbol] | | | | 262 | | | | [symbol] 67 | 0 | 0 | 0 | 3780 | [symbol] 41 | 0 | [symbol] | 3063 |
| K-962 | | | | 263 | | | | 157 | 0 | 85 | 31 | 8144 | 4336 | 276 | 2537 | 1782 |
| UACC-287 | | | | 264 | | | | [symbol] | 0 | 0 | 0 | [symbol] | 0 | 42 | 0 | 1200 |
| M14 | | | | 265 | | | | 0 | 0 | 74 | 0 | [symbol] 27 | 151 | 181 | 0 | 1430 |
| MCF7 | | | | 267 | | | | 5820 | 0 | 0 | 24 | 8234 | 0 | 0 | 17404 | [symbol] |
| MOA-M-436 | | | | 269 | | | | 0 | 0 | 80 | 227 | 1834 | 0 | 0 | 744 | 1343 |
| MT279 | | | | 270 | | | | 1743 | 0 | 0 | 0 | 1534 | 2 [symbol] 3 | 87 | 0 | [symbol] |
| MOA-N | | | | 271 | | | | 0 | 0 | 17 | 0 | 4727 | [symbol] | 283 | 1282 | 3025 |
| v10 poly A* | | | | 273 | | | | [symbol] 006 | 0 | 137 | 0 | 7232 | 1800 | 43 | 854 | 18372 |
| XHOS poly A* | | | | [symbol] | | | | 370 [symbol] | 0 | 14 | [symbol] | 3301 | 32 | 384 | 579 | 4284 |
| HT2.34 24th TPA RHA [symbol] 23 | | | | 300 | | | | 0 | 0 | 19 | 0 | 2942 | [symbol] | 171 | [symbol] 4 | [symbol] |
| HELA-EXP-031000 | | | | 313 | | | | 0 | 0 | 19 | 49 | 2177 | 949 | 24 | 0 | 104 [symbol] |
| HT384 [symbol] | | | | 322 | | | | 630 | 0 | 0 | [symbol] | 4154 | [symbol] | 424 | 773 | 4214 |
| HT347 | | | | 323 | | | | 442 | 0 | 5 | 0 | 244 [symbol] | 2412 | 0 | [symbol] | 54352 |
| 456 [symbol] | | | | 324 | | | | [symbol] | 0 | 55 | 0 | 3464 | 0 | 11 | 761 | 1101 |
| NCI- [symbol] 224 | | | | 334 | | | | 0 | 0 | 0 | 34 | [symbol] | 0 | 100 | 0 | 1100 |
| [symbol] | | | | 337 | | | | 0 | 0 | 0 | 357 | 3132 | 381 | 181 | [symbol] 222 | [symbol] 479 |
| [symbol] -231 | | | | 338 | | | | 7140 | 0 | 22 | 0 | 8113 | 4366 | 0 | [symbol] | 28631 |
| U251 | | | | 339 | | | | 16344 | 0 | [symbol] | 0 | 116 [symbol] | 18310 | 202 | 141005 | 34705 |
| FT [symbol] poly A* | | | | 340 | | | | 0 | 0 | 0 | 0 | [symbol] | 0 | 0 | [symbol] | 2606 |
| FC-3 | | | | 341 | | | | 0 | 0 | 0 | 227 | 3879 | [symbol] | 63 | 584 | 419 |
| HCC-2 [symbol] | | | | 343 | | | | 31 | 0 | 0 | 0 | 2399 | 0 | 138 | 0 | [symbol] |
| SW-420 | | | | 345 | | | | 0 | 0 | 72 | 83 | 2872 | 0 | 106 | [symbol] | 0 |
| MT102 | | | | 346 | | | | 575 | 0 | 80 | 25 | 4309 | [symbol] | 0 | 3475 | 10731 |
| COLO 204 | | | | 347 | | | | 0 | 0 | 24 | 43 | 703 | [symbol] | 0 | 0 | 0 |
| MT218 | | | | 348 | | | | 4211 | 0 | 0 | 0 | 1703 | 0 | 0 | 0 | 1866 |
| [symbol] -12 | | | | 349 | | | | 0 | 0 | 44 | 137 | 1734 | 842 | 102 | 0 | 1130 |
| MT131 | | | | 350 | | | | 0 | 0 | 34 | 202 | 3787 | [symbol] | 2 [symbol] 9 | 0 | [symbol] 774 |
| A [symbol] | | | | 351 | | | | 7840 | 0 | 0 | [symbol] | [symbol] | 0 | 200 | 0 | 0 |
| MT282 | | | | 352 | | | | 250 | 0 | 0 | 0 | 8001 | 0 | 0 | 0 | 18131 |
| ROO [symbol] 3 [symbol] 3 | | | | 353 | | | | 0 | 0 | 134 | 0 | 2870 | 0 | 0 | 0 | 179 |
| TH-19 | | | | 356 | | | | [symbol] | 0 | 0 | 0 | 7868 | 2226 | 0 | 3008 | 17089 |
| [symbol] -3M | | | | 357 | | | | 2843 | 0 | 0 | 0 | 24100 | 16870 | 313 | 37531 | 7453 |
| [symbol] T | | | | 360 | | | | 0 | 0 | 0 | 0 | 1834 | 0 | 0 | [symbol] | 1100 |
| MT213 | | | 60 | | | | | 0 | 0 | 162 | 0 | 13822 | 1275 | 37 | 0 | 43 [symbol] |
| HT [symbol] | | | 62 | | | | | 195 | 0 | 107 | 0 | 5482 | 437 | 0 | 429 | 4 [symbol] 48 |
| HT [symbol] | | | 64 | | | | | 0 | 0 | 0 | 31 | 3341 | 0 | 0 | 0 | 2704 |
| HT134 | | | 54 | | | | | 0 | 0 | 114 | 0 | 3041 | 0 | 0 | 0 | 12179 |
| HT143 | | | 58 | | | | | 337 | 0 | 35 | [symbol] | [symbol] | [symbol] | 0 | 0 | 248 |
| HT170 | | | 60 | | | | | 0 | 0 | 2 [symbol] | 0 | 8332 | 0 | 0 | 0 | 12 [symbol] 50 |
| HT172 | | | 62 | | | | | 0 | 0 | 5 | 0 | 4071 | 0 | 94 | 104 | 2202 |
| HT130 | | | 63 | | | | | 1302 | 0 | 0 | 0 | 3671 | 121 | 0 | 0 | 2 [symbol] |
| HT1 [symbol] | | | 64 | | | | | 0 | 0 | 0 | 701 | 5034 | 0 | 0 | 0 | 2831 |
| HT154 | | | 65 | | | | | 1836 | 0 | 0 | 0 | 8174 | 1 [symbol] 63 | 0 | 0 | 1773 |
| HT140 | | | 66 | | | | | 0 | 0 | 73 | 0 | [symbol] | 0 | 0 | 0 | 2924 |
| HT [symbol] | | | 67 | | | | | 0 | 0 | 0 | 0 | [symbol] | 24 | [symbol] | 343 | 13 [symbol] |
| HT149 | | | 68 | | | | | 0 | 0 | 24 | 5 | 4352 | 0 | 440 | 0 | [symbol] |
| HT143 | | | 69 | | | | | 5 | 0 | 0 | 1176 | 3334 | 0 | [symbol] | 0 | [symbol] |
| HT183 | | | 70 | | | | | [symbol] | 0 | 61 | 0 | 4240 | [symbol] | [symbol] | [symbol] 34 | [symbol] |
| HT148 | | | 71 | | | | | 340 | 0 | 0 | 0 | [symbol] | 0 | 0 | 0 | 3 [symbol] 4 |
| HT227 | | | 72 | | | | | 0 | 0 | 30 | 114 | 4034 | 0 | 0 | 0 | 4727 |
| HT302 | | | 73 | | | | | 420 | 0 | 0 | 123 | 5413 | [symbol] 7 | 32 | 41 [symbol] | [symbol] |
| HT314 | | | 74 | | | | | 429 | 0 | 0 | 0 | 4709 | 6214 | 0 | 0 | [symbol] |
| HT317 | | | 76 | | | | | 243 | 0 | 27 | 0 | [symbol] | 2971 | 0 | 0 | 20750 |
| [symbol] 11 [symbol] | | | 77 | | | | | [symbol] | 0 | 33 | [symbol] | 2199 | [symbol] | 220 | [symbol] | 2212 |
| HT323 | | | 78 | | | | | 83 | 0 | 110 | 0 | [symbol] | [symbol] | 197 | 0 | 5230 |
| HT327 | | | 80 | | | | | 0 | 0 | 124 | 0 | 3771 | 177 [symbol] | [symbol] | 14 | 7320 |
| HT235 | | | 82 | | | | | 0 | 0 | 71 | 0 | [symbol] | [symbol] | 0 | 422 | 17130 |
| HT146 | | | 84 | | | | | 432 | 0 | 120 | 0 | 1141 | 0 | 419 | 0 | 364 |
| HT343 | | | 87 | | | | | 0 | 0 | 0 | 0 | 5314 | [symbol] | 0 | 304 | 21 [symbol] |
| HT311 | | | 170 | | | | | [symbol] | 0 | [symbol] | 0 | 3141 | [symbol] | 234 | 0 | [symbol] |
| HT [symbol] | | | 185 | | | | | 0 | 0 | [symbol] | 0 | 3240 | 0 | 22 [symbol] | 0 | [symbol] |
| HT140 | | | 187 | | | | | 0 | 0 | 0 | 0 | 812 | 0 | 0 | 0 | 303 |
| HT291 | | | 1 [symbol] | | | | | 0 | 0 | 244 | 0 | 2857 | 1134 | 0 | 0 | [symbol] 47 |
| HT372 | | | 191 | | | | | 0 | 0 | [symbol] | 242 | 33 [symbol] | [symbol] 23 | 247 | 0 | 431 |
| TCGP | | | 207 | | | | | 0 | 0 | 0 | 212 | [symbol] | [symbol] | 0 | 811 | [symbol] 17 |
| HT100 | | | 276 | | | | | 131 | 0 | 0 | 0 | 801 | 0 | 202 | 429 | 2730 |
| HT307 | | | 217 | | | | | 0 | 0 | 115 | 0 | 1318 | 0 | 0 | 0 | 4418 |
| HT300 | | | 234 | | | | | 0 | 0 | 45 | 15 | [symbol] | 0 | [symbol] 0 | 827 | 33 [symbol] |
| HT370 | | | 224 | | | | | 1027 | 0 | 22 | 0 | [symbol] | 44 | 134 | 644 | 11858 |
| HT371 | | | 229 | | | | | 0 | 0 | [symbol] | 27 | 4211 | 0 | 0 | 281 | 9410 |
| HT377 | | | 230 | | | | | 405 | 0 | 23 | 0 | 3712 | 779 | 292 | 0 | [symbol] |
| HT342 | | | 236 | | | | | [symbol] | 0 | [symbol] | 0 | [symbol] | 408 | 0 | 627 | 7080 |
| [symbol] | | | 281 | | | | | 0 | 0 | 0 | [symbol] 7 | 0 | 0 | 0 | 0 | 0 |
| HT334 | | | [symbol] | | | | | 0 | 0 | 32 | 0 | 4472 | 0 | 0 | 0 | 32015 |
| HT338 | | | 301 | | | | | 0 | 0 | 0 | 3 | 3010 | 0 | 202 | 0 | 6382 |
| HT342 | | | 315 | | | | | 544 | 0 | 0 | 71 | 2100 | 0 | 0 | 0 | 2019 |
| HT304 | | | 317 | | | | | 0 | 0 | 0 | 102 | 2127 | 19712 | 2 | 0 | [symbol] |
| HT312 | | | 319 | | | | | 2077 | 0 | 0 | 104 | 2504 | 65 | 0 | [symbol] | 6517 |
| HT162 | | | 325 | | | | | 0 | 0 | 10 | 0 | 1411 | 0 | 193 | 0 | 0 |
| HT [symbol] | | | 334 | | | | | 0 | 0 | 0 | 0 | 6212 | 294 | 0 | 182 | 4313 |
| HT137 | | | 3 [symbol] 0 | | | | | [symbol] | 0 | 6 | 324 | 2314 | 426 | 0 | 374 | 1 [symbol] |
| T-410 | 143 | | | | | | | [symbol] | 0 | 0 | 0 | 4107 | [symbol] | 253 | [symbol] | [symbol] |
| MDA-N | 141 | | | | | | | 22 [symbol] | 0 | 49 | 0 | [symbol] | 0 | [symbol] | 13 [symbol] | [symbol] |
| MOA- [symbol] -4.34 | 108 | | | | | | | 1148 | 0 | 68 | 130 | [symbol] | 814 | [symbol] | 7 [symbol] | [symbol] |
| MOA- [symbol] -231 | 157 | | | | | | | 3 [symbol] 1 | 0 | 0 | 103 | 4223 | 381 | 200 | 141 | [symbol] |
| Ha [symbol] | 153 | | | | | | | [symbol] | 0 | 84 | 0 | 4775 | 0 | 870 | 1534 | 13305 |
| MCF-7/AC [symbol] | 153 | | | | | | | [symbol] | 0 | 0 | [symbol] | [symbol] | 0 | 110 | [symbol] | [symbol] |
| MCF/ | 151 | | | | | | | 3033 | 0 | [symbol] | 0 | [symbol] | 0 | [symbol] 2 | 0 | [symbol] |
| M [symbol] | 149 | | | | | | | 0 | 0 | [symbol] | 0 | [symbol] | 0 | [symbol] 3 | 0 | [symbol] |
| LIACC-257 | 147 | | | | | | | 0 | 0 | 0 | 0 | [symbol] | 0 | 0 | 813 | [symbol] |
| LIACC- [symbol] | 145 | | | | | | | 0 | 0 | 47 | [symbol] | [symbol] | 0 | [symbol] | [symbol] | [symbol] |
| [symbol] | 144 | | | | | | | [symbol] | 0 | 101 | 0 | [symbol] | 0 | [symbol] | [symbol] | [symbol] |
| LO-31 | 143 | | | | | | | 756 | 0 | 0 | 0 | [symbol] | 0 | [symbol] | [symbol] | [symbol] |
| [symbol] | 142 | | | | | | | [symbol] | 0 | 14 | 0 | [symbol] | 0 | [symbol] | [symbol] | [symbol] |
| [symbol] -12 | 141 | | | | | | | [symbol] | 0 | 0 | 29 | [symbol] | 0 | 437 | [symbol] | [symbol] |
| [symbol] | 140 | | | | | | | 0 | 0 | 4 | 0 | [symbol] | 0 | 177 | [symbol] | [symbol] |
| NCT-1 [symbol] | 139 | | | | | | | 0 | 0 | 0 | 0 | [symbol] | 0 | [symbol] | [symbol] | [symbol] |
| [symbol] | 139 | | | | | | | 1 [symbol] | 0 | 0 | 0 | [symbol] | 0 | 3 [symbol] | [symbol] | [symbol] |
| C₂O [symbol] O20 [symbol] | 137 | | | | | | | [symbol] 2 | 0 | 232 | [symbol] | [symbol] | 0 | 311 | [symbol] | [symbol] |
| LOX [symbol] | 138 | | | | | | | [symbol] | 0 | 0 | 121 | [symbol] | 0 | 0 | [symbol] | [symbol] |
| [symbol] | 135 | | | | | | | [symbol] | 0 | 37 | 0 | [symbol] | 0 | [symbol] | [symbol] | [symbol] |
| [symbol] | 134 | | | | | | | 1 [symbol] | 0 | 0 | 10 | [symbol] | 0 | 304 | [symbol] | [symbol] |
| HCT [symbol] | 133 | | | | | | | [symbol] | 0 | 107 | 104 | [symbol] | 0 | 204 | [symbol] | [symbol] |
| [symbol] | 132 | | | | | | | [symbol] 791 | 0 | 7 | 110 | [symbol] | 0 | 180 | [symbol] | [symbol] |
| HCC- [symbol] | 131 | | | | | | | 1371 | 0 | 0 | 0 | [symbol] | 0 | 370 | [symbol] | [symbol] |
| AC [symbol] | 130 | | | | | | | 0 | 0 | 0 | 104 | [symbol] | 0 | 2 [symbol] | [symbol] | [symbol] |
| C-2 [symbol] | 129 | | | | | | | 0 | 0 | 0 | 0 | [symbol] | 0 | 102 | [symbol] | [symbol] |
| [symbol] | 129 | | | | | | | [symbol] | 0 | 11 | 212 | [symbol] | 0 | 220 | [symbol] | [symbol] |
| [symbol] | 127 | | | | | | | 454 | 0 | 0 | 82 | [symbol] | 0 | [symbol] | [symbol] | [symbol] |
| C [symbol] | 126 | | | | | | | 0 | 0 | 132 | 160 | [symbol] | 0 | [symbol] | [symbol] | [symbol] |
| [symbol] | 128 | | | | | | | [symbol] | 0 | 2 | 0 | [symbol] | 0 | [symbol] | [symbol] | [symbol] |
| [symbol] | 124 | | | | | | | 2 [symbol] | 0 | 124 | 245 | [symbol] | 0 | [symbol] | [symbol] | [symbol] |
| R [symbol] 8228 | 121 | | | | | | | 0 | 0 | 0 | 64 | [symbol] | 0 | 0 | [symbol] | [symbol] |
| [symbol] | 122 | | | | | | | 0 | 0 | 0 | [symbol] | [symbol] | 0 | 732 | [symbol] | [symbol] |
| HS-40 | 12 [symbol] | | | | | | | 0 | 0 | 0 | 104 | [symbol] | 0 | 102 | [symbol] | [symbol] |
| MCL, T-4 | 120 | | | | | | | [symbol] | 0 | 24 | 0 | [symbol] | 0 | [symbol] | [symbol] | [symbol] |
| OVCAR-5 | 119 | | | | | | | 576 | 0 | 14 | 30 | [symbol] | 0 | 203 | [symbol] | [symbol] |
| X-562 [symbol] | 119 | | | | | | | 0 | 0 | 0 | 0 | [symbol] | 0 | 83 | [symbol] | [symbol] |
| OVCAR [symbol] -4 | 117 | | | | | | | [symbol] | 0 | 0 | 0 | [symbol] | 0 | [symbol] | [symbol] | [symbol] |
| CC [symbol] -CEM | 118 | | | | | | | [symbol] | 0 | 70 | 0 | [symbol] | 0 | 372 | [symbol] | [symbol] |
| OVCAR-3 | 115 | | | | | | | 2334 | 0 | [symbol] | 0 | [symbol] | 0 | 302 | [symbol] | [symbol] |
| 5F-539 [symbol] | 114 | | | | | | | 941 | 0 | 2 | 0 | [symbol] | 0 | 1013 | [symbol] | [symbol] |
| HCF- [symbol] | 113 | | | | | | | 527 | 0 | 0 | [symbol] | [symbol] | 0 | 130 | [symbol] | [symbol] |
| SF- [symbol] | 112 | | | | | | | 678 | 0 | 0 | 210 | [symbol] | 0 | 0 | [symbol] | [symbol] |
| ASCMATCC | 111 | | | | | | | 1174 | 0 | 0 | 193 | [symbol] | 0 | 74 | [symbol] | [symbol] |
| SF-Z [symbol] | 110 | | | | | | | [symbol] | 0 | 0 | 112 | [symbol] | 0 | 387 | [symbol] | [symbol] |
| NC [symbol] | 100 | | | | | | | 0 | 0 | 21 | 0 | [symbol] | 0 | 854 | [symbol] | [symbol] |
| U251 | 104 | | | | | | | [symbol] | 0 | 0 | 474 | [symbol] | 0 | 102 | [symbol] | [symbol] |
| NCI- [symbol] | 107 | | | | | | | 2 [symbol] | 0 | 221 | 47 | [symbol] | 0 | [symbol] 3 | [symbol] | [symbol] |
| S [symbol] -7 [symbol] | 104 | | | | | | | [symbol] | 0 | 76 | 3 | [symbol] | 0 | 231 | 1213 | [symbol] |
| MC [symbol] | 105 | | | | | | | 0 | 0 | 0 | 20 | [symbol] | 0 | 110 | 0 | [symbol] |
| S [symbol] - [symbol] | 104 | | | | | | | 20 | 0 | 63 | 0 | [symbol] | 0 | 110 | 0 | [symbol] |
| MC3-H228 [symbol] | 103 | | | | | | | [symbol] | 0 | 19 | 0 | [symbol] | 0 | 110 | 0 | [symbol] |
| SV-OV-3 | 102 | | | | | | | [symbol] | 0 | 0 | 0 | [symbol] | 0 | 110 | 2000 | [symbol] |
| MCF-23 [symbol] | 101 | | | | | | | 200 | 0 | 142 | 0 | [symbol] | 0 | 110 | 1710 | [symbol] |
| [symbol] | 100 | | | | | | | 0 | 0 | 0 | 0 | 0 | 4775 | 0 | 0 | [symbol] |
| [symbol] | [symbol] | | | | | | | [symbol] | 0 | 14 | 14 | [symbol] | 3052 | 0 | 20 | [symbol] |
| OVCAR- [symbol] | 99 | | | | | | | 0 | 0 | 72 | 0 | [symbol] | [symbol] | 0 | 111 | 2 [symbol] |
| HCF-43 [symbol] | 87 | | | | | | | 0 | 0 | 0 | 0 | [symbol] | 0 | 110 | 446 | 4534 |
| [symbol] 12 | 44 | | | | | | | 11 [symbol] | 0 | 123 | 112 | 2977 | [symbol] | 0 | 1226 | 2044 |
| [symbol] 17 | 47 | | | | | | | 2736 | 0 | 112 | 0 | 4152 | [symbol] | 0 | 747 | 4422 |
| [symbol] 10 | 46 | | | | | | | 1043 | 0 | 0 | 329 | 3112 | [symbol] | 254 | 0 | 2 [symbol] |
| TCCP | 24 | | | | | | | 0 | 0 | 114 | 0 | 3352 | [symbol] 36 | 254 | 311570 | 311 [symbol] |
| [symbol] -1 | | | | | | | wt | 487 | 106 | 37 | 0 | 0 | 0 | 0 | 0 | 0 |
| AS [symbol] -2 | | | | | | | wt | 317 | [symbol] | 193 | 0 | 0 | 0 | 0 | 0 | 0 |
| AS [symbol] -4 | | | | | | | wt | 0 | 109 | 92 | 0 | 0 | 0 | 0 | 0 | 0 |
| [symbol] -5 | | | | | | | wt | 321 | 234 | 44 | 0 | 0 | 0 | 0 | 0 | 0 |
| [symbol] -7 | | | | | | | [symbol] | 5881 | [symbol] | 265 | 0 | 0 | 0 | 0 | 0 | 0 |
| BXVx-3 | | | | | | | [symbol] | 2147 | [symbol] | 0 | 0 | 0 | 0 | 0 | 0 | 0 |
| BXVx-4 | | | | | | | [symbol] | 2885 | 0 | [symbol] | 0 | 0 | 0 | 0 | 0 | 0 |
| BXVx-3 | | | | | | | [symbol] | 1030 | 0 | 0 | 0 | 0 | 0 | 0 | 0 | 0 |
| BXVx-5 | | | | | | | [symbol] | 0 | 1623 | 0 | 0 | 0 | 0 | 0 | 0 | 0 |
| BXVx-7 | | | | | | | wt | 0 | 0 | 0 | 0 | 0 | 0 | 0 | 0 | 0 |
| MCF-7-1 | | | | | | | wt | 403 | 0 | [symbol] | 0 | 0 | 0 | 0 | 0 | 0 |
| MCF-7-2 | | | | | | | wt | 190 | 0 | 116 | 0 | 0 | 0 | 0 | 0 | 0 |
| MCF-7-4 | | | | | | | wt | 3124 | 0 | 0 | 0 | 0 | 0 | 0 | 0 | 0 |
| MCF-7- [symbol] | | | | | | | wt | [symbol] | 0 | 1213 | 0 | 0 | 0 | 0 | 0 | 0 |
| MCF-7-7 | | | | | | | [symbol] | 0 | 0 | 135 | 0 | 0 | 0 | 0 | 0 | 0 |
| AC [symbol] -RES-1 | | | | | | | [symbol] | [symbol] 24 | 278 | 290 | 0 | 0 | 0 | 0 | 0 | 0 |
| AC [symbol] -RES-3 | | | | | | | [symbol] | 4757 | 572 | 109 | 0 | 0 | 0 | 0 | 0 | 0 |
| AC [symbol] -RES-4 | | | | | | | [symbol] | 436 | 241 | 84 | 0 | 0 | 0 | 0 | 0 | 0 |
| AC [symbol] -RES-5 | | | | | | | [symbol] | 7 [symbol] | [symbol] 1 | 11 | 0 | 0 | 0 | 0 | 0 | 0 |
| AC [symbol] -RES-7 | | | | | | | wt | 2513 | 0 | 176 | 0 | 0 | 0 | 0 | 0 | 0 |
| WI 34-1 | | | | | | | wt | 1 [symbol] 9 | 0 | [symbol] | 0 | 0 | 0 | 0 | 0 | 0 |
| WI 34-3 | | | | | | | wt | 0 | 0 | 0 | 0 | 0 | 0 | 0 | 0 | 0 |
| WI 34-4 | | | | | | | wt | 30 [symbol] | 0 | 37 | 0 | 0 | 0 | 0 | 0 | 0 |
| WI 34-6 | | | | | | | wt | [symbol] 12 | 365 | 43 | 0 | 0 | 0 | 0 | 0 | 0 |
| WI 34-7 | | | | | | | MPV [symbol] | [symbol] 12 | 0 | 7 | 0 | 0 | 0 | 0 | 0 | 0 |
| [symbol] -1 | | | | | | | MPV [symbol] | 0 | 0 | 60 | 0 | 0 | 0 | 0 | 0 | 0 |
| [symbol] -3 | | | | | | | MPV [symbol] | [symbol] 2 | [symbol] | 115 | 0 | 0 | 0 | 0 | 0 | 0 |
| [symbol] -4 | | | | | | | MPV [symbol] | [symbol] | [symbol] | 172 | 0 | 0 | 0 | 0 | 0 | 0 |
| [symbol] -6 | | | | | | | MPV [symbol] | [symbol] 47 | 0 | 7 | 0 | 0 | 0 | 0 | 0 | 0 |
| [symbol] -7 | | | | | | | [symbol] | 42 [symbol] | 0 | 27 | 0 | 0 | 0 | 0 | 0 | 0 |
| HI [symbol] -1 | | | | | | | [symbol] | 0 | 0 | 183 | 0 | 0 | 0 | 0 | 0 | 0 |
| HI [symbol] -3 | | | | | | | [symbol] | 1149 | [symbol] | 34 | 0 | 0 | 0 | 0 | 0 | 0 |
| HI [symbol] -4 | | | | | | | [symbol] | 1154 | 0 | 104 | 0 | 0 | 0 | 0 | 0 | 0 |
| HI [symbol] -5 | | | | | | | [symbol] | 819 | 341 | 71 | 0 | 0 | 0 | 0 | 0 | 0 |
| HI [symbol] -7 | | | | | | | wt | 0 | 2430 | 0 | 0 | 0 | 0 | 0 | 0 | 0 |
| [symbol] -2 | | | | | | | wt | 751 | 0 | 205 | 0 | 0 | 0 | 0 | 0 | 0 |
| B [symbol] -2 | | | | | | | [symbol] | 21741 | [symbol] | 206 | 0 | 0 | 0 | 0 | 0 | 0 |
| HCT-114-1 | | | | | | | wt | 849 | 256 | 430 | 0 | 0 | 0 | 0 | 0 | 0 |
| HCT-114-2 | | | | | | | wt | 8204 | 261 | [symbol] | 0 | 0 | 0 | 0 | 0 | 0 |
| HT29-2 | | | | | | | wt | [symbol] 7 | [symbol] 202 | 0 | 0 | 0 | 0 | 0 | 0 | 0 |
| SFC30-1 | | | | | | | wt | 1107 | 261 | 0 | 0 | 0 | 0 | 0 | 0 | 0 |
| SFC30-2 | | | | | | | wt | [symbol] 3 | 302 | 71 | 0 | 0 | 0 | 0 | 0 | 0 |
| SF- [symbol] -1 | | | | | | | wt | [symbol] 74 | [symbol] 4 | 84 | 130 | 0 | 0 | 0 | 0 | 0 |
| SF [symbol] -2 | | | | | | | [symbol] | 11314 | 4311 | 295 | 0 | 0 | 0 | 0 | 0 | 0 |
| OVC-1 | | | | | | | [symbol] | [symbol] | 701 | 0 | 0 | 0 | 0 | 0 | 0 | 0 |
| OVC-2 | | | | | | | wt | 0 | 0 | 0 | 0 | 0 | 0 | 0 | 0 | 0 |
| OVC-1 | | | | | | | wt | [symbol] 05 | 0 | 0 | 0 | 0 | 0 | 0 | 0 | 0 |
| OVC-2 | | | | | | | [symbol] | [symbol] 7 | [symbol] | 0 | 0 | 0 | 0 | 0 | 0 | 0 |
| HCF-7-2 | | | | | | | wt | 21 [symbol] | 0 | 43 | 0 | 0 | 0 | 0 | 0 | 0 |
| [symbol] - [symbol] -2 | | | | | | | [symbol] | [symbol] | 747 | [symbol] | 0 | 0 | 0 | 0 | 0 | 0 |
| [symbol] -2 | | | | | | | HPV [symbol] | 2741 | 0 | [symbol] | 0 | 0 | 0 | 0 | 0 | 0 |
| [symbol] -1 | | | | | | | [symbol] | [symbol] 3 | 1075 | [symbol] | 0 | 0 | 0 | 0 | 0 | 0 |
| [symbol] -2 | | | | | | | [symbol] | [symbol] 3 | 714 | [symbol] | 0 | 0 | 0 | 0 | 0 | 0 |
| C3 [symbol] -1 | | | | | | | [symbol] | 322 | 571 | 0 | 0 | 0 | 0 | 0 | 0 | 0 |
| C33A-2 | | | | | | | [symbol] | 315 | 0 | 57 | 0 | 0 | 0 | 0 | 0 | 0 |
| U3O [symbol] -1 | | | | | | | [symbol] | [symbol] 4 [symbol] | 0 | 75 | 0 | 0 | 0 | 0 | 0 | 0 |
| U3 [symbol] -2 | | | | | | | [symbol] | 8301 | 1141 | 0 | 0 | 0 | 0 | 0 | 0 | 0 |
| H [symbol] -1 | | | | | | | [symbol] | 3542 | 1206 | 00 | 0 | 0 | 0 | 0 | 0 | 0 |
| [symbol] -2 | | | | | | | [symbol] | 2 [symbol] | [symbol] | 46 | 0 | 0 | 0 | 0 | 0 | 0 |
| WI [symbol] -2 | | | | | | | wt | 430 [symbol] | 734 | 18 | 0 | 0 | 0 | 0 | 0 | 0 |
| [symbol] - [symbol] | | | | | | | wt | 0 | 631 | 21 | 0 | 0 | 0 | 0 | 0 | 0 |
| [symbol] -1 | | | | | | | wt | 513 | 0 | 72 | 0 | 0 | 0 | 0 | 0 | 0 |
| [symbol] -2 | | | | | | | | 3 [symbol] | 0 | [symbol] | 0 | 0 | 0 | 0 | 0 | 0 |
| [symbol] -3 | | | | | | | | [symbol] | 0 | 0 | 0 | 0 | 0 | 0 | 0 | 0 |
| [symbol] -4 | | | | | | | | [symbol] | [symbol] | 0 | 0 | 0 | 0 | 0 | 0 | 0 |
| [symbol] -5 | | | | | | | | [symbol] | 0 | 0 | 0 | 0 | 0 | 0 | 0 | 0 |
| [symbol] -6 | | | | | | | | [symbol] | 739 | 311 | 0 | 0 | 0 | 0 | 0 | 0 |
| [symbol] -7 | | | | | | | | [symbol] | 0 | 37 | 0 | 0 | 0 | 0 | 0 | 0 |
| [symbol] -8 | | | | | | | | [symbol] | 0 | 0 | 0 | 0 | 0 | 0 | 0 | 0 |
| [symbol] | | | | [symbol] | | | | [symbol] | [symbol] | 157 | 1273 | 872 | 1279 | 1930 | [symbol] | [symbol] |
| [symbol] | | | | 160 | | | | 233 | [symbol] | 227 | 273 | 272 | 8628 | [symbol] | [symbol] | 23879 |
| [symbol] | | | | 140 | | | | [symbol] | [symbol] | 0 | 1074 | 232 | 100 | 2001 | [symbol] | [symbol] |
| [symbol] | | | | 171 | | | | 9 | 1863 | 0 | 234 | 13 | 137 | 179 | 138 | [symbol] |
| [symbol] | | | | 181 | | | | 279 | 3104 | 0 | 24 | 0 | 0 | [symbol] | 0 | 13074 |
| [symbol] | | | | 183 | | | | 127 | 833 | 0 | [symbol] | 0 | 0 | 643 | 230 | [symbol] |
| [symbol] | | | | 184 | | | | 0 | [symbol] | 0 | 104 | 0 | 1428 | 1643 | [symbol] | [symbol] |
| [symbol] | | | | 186 | | | | 237 | 3283 | 8277 | 0 | 0 | 238 | 2918 | [symbol] | 17778 |
| [symbol] | | | | 188 | | | | 0 | 8583 | 0 | 259 | 0 | 1158 | 2807 | 14303 | 28547 |
| uncc.Q | | | | 200 | | | | 1432 | [symbol] | 0 | 252 | 0 | 475 | 2323 | 2875 | 17274 |
| [symbol] | | | | 202 | | | | 185 | 2223 | 245 | 0 | 11 | 281 | 1444 | [symbol] | [symbol] |
| UTCS [symbol] | | | | 204 | | | | 9 | 7812 | 0 | 704 | 9 | 8 | 1820 | 617 | [symbol] |
| [symbol] | | | | [symbol] | | | | 198 | 9 | 0 | 34 | 123 | 850 | 673 | [symbol] | [symbol] |
| [symbol] | | | | [symbol] | | | | 0 | 18176 | 0 | 423 | 43 | 0 | 2343 | 23131 | [symbol] |
| CCL 137 RAX 321 [symbol] | | | | 214 | | | | 273 | 1848 | 0 | 290 | 0 | 287 | 1447 | [symbol] | 73444 |
| WL37 73 [symbol] | | | | 219 | | | | 271 | 3187 | 1980 | 0 | 34 | 423 | 3283 | 0 | 61474 |
| [symbol] 1 | | | | 220 | | | | 0 | [symbol] | 0 | 31 | [symbol] | 0 | [symbol] | 63 | [symbol] |
| [symbol] 2 | | | | 221 | | | | 2284 | 2813 | 4 | 6 | 0 | 423 | 2710 | 154 | 46200 |
| [symbol] 4 | | | | 222 | | | | 705 | 2838 | 0 | 113 | 0 | 322 | 2128 | 41 | 41277 |
| [symbol] | | | | 223 | | | | 827 | [symbol] | 0 | 37 | 0 | 1300 | 2312 | 88 | 28345 |
| [symbol] | | | | 241 | | | | 0 | 2342 | 0 | 218 | 0 | 0 | 1773 | 13338 | [symbol] |
| [symbol] | | | | 242 | | | | [symbol] | [symbol] | 782 | 483 | 461 | 2874 | 3182 | 38418 | [symbol] |
| [symbol] | | | | 243 | | | | 0 | 13683 | 0 | 328 | 73 | 3120 | [symbol] | [symbol] | [symbol] |
| [symbol] | | | | 244 | | | | 0 | 14211 | [symbol] | 23 | 431 | 2402 | 3000 | 13000 | [symbol] |
| [symbol] | | | | 245 | | | | 150 | 13043 | 577 | 2005 | 187 | 3423 | 4323 | [symbol] | [symbol] |
| [symbol] | | | | 246 | | | | 0 | 1320 | 480 | 179 | 0 | 324 | 2372 | 18372 | [symbol] |
| [symbol] | | | | 247 | | | | [symbol] | 3460 | 0 | 819 | 384 | 831 | 1981 | 2383 | 18071 |
| [symbol] | | | | 248 | | | | 0 | 1314 | 323 | 0 | 23 | 204 | [symbol] | [symbol] | 17287 |
| [symbol] | | | | 249 | | | | 0 | 7307 | 0 | 214 | 120 | 1020 | 2434 | 7704 | [symbol] |
| [symbol] | | | | 250 | | | | 0 | 18785 | 309 | 1450 | 0 | 2338 | [symbol] | [symbol] | 27342 |
| [symbol] | | | | 251 | | | | 223 | 314 | 1399 | 0 | 189 | 473 | 804 | 1431 | 7813 |
| [symbol] | | | | 252 | | | | 372 | 3404 | 0 | 0 | 0 | 143 | 547 | 1123 | 1000 |
| [symbol] | | | | 253 | | | | 2503 | [symbol] | 1811 | 825 | 87 | 1738 | 3343 | 12200 | [symbol] |
| [symbol] | | | | 254 | | | | 0 | 5112 | 804 | 178 | 804 | 2335 | [symbol] | [symbol] | 18317 |
| [symbol] | | | | 255 | | | | 8 | 3304 | 824 | 733 | 0 | 1122 | 1380 | [symbol] | 14180 |
| [symbol] | | | | 256 | | | | 273 | 17258 | 435 | 834 | 61 | [symbol] | [symbol] | 30147 | [symbol] |
| [symbol] | | | | 257 | | | | 1134 | 8352 | 758 | 718 | 84 | 2332 | 3044 | [symbol] | 31784 |
| [symbol] | | | | 258 | | | | 8 | 2305 | 0 | 19 | 0 | 0 | [symbol] | 4002 | 13814 |
| [symbol] | | | | 259 | | | | 83 | 3327 | 0 | 200 | 0 | 1000 | 3742 | 8318 | 17044 |
| [symbol] | | | | 260 | | | | 136 | 3811 | 0 | 48 | 123 | 1305 | 1144 | 3811 | [symbol] |
| [symbol] | | | | 261 | | | | 3832 | 12225 | 0 | 834 | 152 | 7473 | [symbol] | [symbol] | [symbol] |
| [symbol] | | | | 262 | | | | 0 | 7037 | 0 | 384 | 0 | 1713 | 1981 | 8411 | [symbol] |
| [symbol] | | | | 263 | | | | 847 | 8209 | 1348 | 1885 | 30 | [symbol] | 1374 | [symbol] | [symbol] |
| [symbol] | | | | 264 | | | | 9 | 4275 | 0 | 428 | 0 | 1320 | 2304 | 3184 | [symbol] |
| [symbol] | | | | 265 | | | | 0 | 2838 | 0 | 0 | 214 | 804 | 717 | 1178 | 17725 |
| [symbol] | | | | 267 | | | | 829 | [symbol] | [symbol] | [symbol] | 834 | [symbol] | [symbol] | 78777 | 80530 |
| [symbol] | | | | 259 | | | | 144 | 8376 | 477 | 843 | 0 | [symbol] | 1857 | 1143 | 24183 |
| [symbol] | | | | 270 | | | | 14 | 4483 | 0 | 0 | 0 | 891 | 2124 | 281 | 41001 |
| [symbol] | | | | 271 | | | | 278 | 7085 | 0 | 354 | 02 | 1290 | 1838 | [symbol] | [symbol] |
| [symbol] | | | | 273 | | | | 0 | [symbol] | 0 | 378 | 0 | 3785 | 8025 | [symbol] | [symbol] |
| [symbol] | | | | [symbol] | | | | 0 | 20754 | 17233 | 317 | 234 | 8784 | 4273 | 38084 | 70087 |
| [symbol] | | | | 300 | | | | 783 | 3081 | 0 | 1454 | 0 | 2334 | 2492 | 237 | 31817 |
| [symbol] | | | | 313 | | | | 834 | 1812 | 0 | 247 | 0 | 1340 | 2042 | 4181 | 30714 |
| [symbol] | | | | 322 | | | | 1441 | [symbol] | 0 | 0 | [symbol] | 2312 | 8180 | [symbol] | [symbol] |
| [symbol] | | | | 323 | | | | 404 | [symbol] | 0 | 0 | 0 | 2030 | 3024 | [symbol] | 43021 |
| [symbol] | | | | 324 | | | | 1327 | 40673 | 0 | 0 | [symbol] | [symbol] | [symbol] | [symbol] | [symbol] |
| [symbol] | | | | [symbol] | | | | 672 | [symbol] | [symbol] | [symbol] | 0 | [symbol] | [symbol] | [symbol] | [symbol] |
| [symbol] | | | | 237 | | | | 0 | [symbol] | 0 | [symbol] | [symbol] | [symbol] | 1717 | [symbol] | [symbol] |
| [symbol] | | | | 238 | | | | 1103 | [symbol] | 1217 | [symbol] | 1217 | [symbol] | [symbol] | [symbol] | [symbol] |
| [symbol] | | | | 239 | | | | 132 | [symbol] | 1171 | [symbol] | [symbol] | [symbol] | [symbol] | [symbol] | [symbol] |
| [symbol] | | | | 240 | | | | [symbol] | [symbol] | 0 | [symbol] | 0 | [symbol] | [symbol] | [symbol] | [symbol] |
| [symbol] | | | | 241 | | | | 177 | [symbol] | [symbol] | [symbol] | 2330 | [symbol] | [symbol] | [symbol] | [symbol] |
| [symbol] | | | | 242 | | | | [symbol] | [symbol] | 0 | [symbol] | [symbol] | [symbol] | [symbol] | [symbol] | [symbol] |
| [symbol] | | | | 245 | | | | 25 | [symbol] | 0 | [symbol] | [symbol] | [symbol] | [symbol] | [symbol] | [symbol] |
| [symbol] | | | | 246 | | | | 1001 | [symbol] | [symbol] | [symbol] | 0 | 1412 | 6254 | [symbol] | [symbol] |
| [symbol] | | | | 247 | | | | [symbol] | [symbol] | 0 | [symbol] | 0 | 0 | [symbol] | [symbol] | [symbol] |
| [symbol] | | | | 248 | | | | [symbol] | [symbol] | 0 | 77 | 114 | 0 | [symbol] | [symbol] | [symbol] |
| [symbol] | | | | 249 | | | | [symbol] | 11062 | 0 | 408 | 0 | [symbol] | [symbol] | [symbol] | [symbol] |
| [symbol] | | | | 250 | | | | [symbol] | [symbol] | 0 | 0 | 0 | 723 | 2737 | [symbol] | [symbol] |
| [symbol] | | | | 251 | | | | [symbol] | [symbol] | 0 | [symbol] | [symbol] | [symbol] | [symbol] | [symbol] | [symbol] |
| [symbol] | | | | 252 | | | | 724 | [symbol] | [symbol] | 0 | 0 | [symbol] | [symbol] | [symbol] | [symbol] |
| [symbol] | | | | 253 | | | | 0 | [symbol] | 0 | 114 | 73 | [symbol] | 2720 | 7230 | [symbol] |
| [symbol] | | | | 255 | | | | [symbol] | [symbol] | [symbol] | [symbol] | [symbol] | [symbol] | [symbol] | [symbol] | [symbol] |
| [symbol] | | | | 257 | | | | 2111 | [symbol] | [symbol] | [symbol] | [symbol] | [symbol] | [symbol] | [symbol] | [symbol] |
| [symbol] | | | | 258 | | | | 0 | [symbol] | 0 | [symbol] | [symbol] | [symbol] | [symbol] | [symbol] | [symbol] |
| [symbol] | | | 50 | | | | | 0 | [symbol] | 47 | 0 | 0 | [symbol] | 1700 | 28 | [symbol] |
| [symbol] | | | 52 | | | | | [symbol] | [symbol] | 0 | 0 | 272 | 783 | 2541 | 7541 | [symbol] |
| [symbol] | | | 54 | | | | | [symbol] | [symbol] | 0 | 4 | [symbol] | 0 | [symbol] | [symbol] | [symbol] |
| [symbol] | | | 56 | | | | | 0 | [symbol] | 0 | [symbol] | [symbol] | [symbol] | 2131 | 2121 | [symbol] |
| [symbol] | | | 58 | | | | | [symbol] | [symbol] | [symbol] | 0 | [symbol] | [symbol] | [symbol] | [symbol] | [symbol] |
| [symbol] | | | 60 | | | | | 31 | [symbol] | 0 | 252 | 0 | [symbol] | 4324 | [symbol] | [symbol] |
| [symbol] | | | 62 | | | | | 0 | [symbol] | 0 | 0 | 17 | [symbol] | [symbol] | 0 | [symbol] |
| [symbol] | | | 63 | | | | | 0 | 2523 | 0 | 0 | 43 | [symbol] | 1070 | [symbol] | [symbol] |
| [symbol] | | | 64 | | | | | 31 | [symbol] | 0 | 0 | 143 | 343 | [symbol] | 800 | [symbol] |
| [symbol] | | | 65 | | | | | 0 | 1277 | [symbol] | 0 | [symbol] | [symbol] | [symbol] | 0 | [symbol] |
| [symbol] | | | 66 | | | | | [symbol] | [symbol] | 0 | [symbol] | 0 | [symbol] | [symbol] | [symbol] | [symbol] |
| [symbol] | | | 67 | | | | | 427 | [symbol] | 0 | 0 | 229 | [symbol] | 455 | [symbol] | [symbol] |
| [symbol] | | | 68 | | | | | [symbol] | [symbol] | [symbol] | 122 | 0 | [symbol] | [symbol] | [symbol] | [symbol] |
| [symbol] | | | 69 | | | | | 2067 | 246 | 0 | 0 | 0 | [symbol] | [symbol] | 42 | [symbol] |
| [symbol] | | | 70 | | | | | 0 | [symbol] | [symbol] | [symbol] | 0 | [symbol] | [symbol] | [symbol] | [symbol] |
| [symbol] | | | 71 | | | | | 1063 | 3301 | [symbol] | 0 | 74 | 3282 | 1823 | 230 | [symbol] |
| [symbol] | | | 72 | | | | | 0 | [symbol] | 0 | [symbol] | [symbol] | [symbol] | [symbol] | 257 | [symbol] |
| [symbol] | | | 73 | | | | | 0 | [symbol] | 0 | 430 | 112 | 0 | 2081 | [symbol] | [symbol] |
| [symbol] | | | 74 | | | | | 0 | [symbol] | [symbol] | 0 | 41 | 279 | 1765 | [symbol] | [symbol] |
| [symbol] | | | [symbol] | | | | | 275 | [symbol] | 0 | 2002 | [symbol] | [symbol] | [symbol] | [symbol] | [symbol] |
| [symbol] | | | 77 | | | | | 6 | 3161 | [symbol] | [symbol] | [symbol] | [symbol] | 2011 | [symbol] | [symbol] |
| [symbol] | | | [symbol] | | | | | [symbol] | [symbol] | [symbol] | 1120 | [symbol] | [symbol] | [symbol] | [symbol] | [symbol] |
| [symbol] | | | 80 | | | | | [symbol] | [symbol] | 0 | [symbol] | 41 | [symbol] | 1737 | [symbol] | [symbol] |
| [symbol] | | | 82 | | | | | 0 | 7064 | 112 | 1 | 201 | 2486 | 2254 | [symbol] | 70437 |
| [symbol] | | | 85 | | | | | [symbol] | [symbol] | [symbol] | 142 | 0 | 0 | [symbol] | [symbol] | 12152 |
| [symbol] | | | 87 | | | | | [symbol] | [symbol] | [symbol] | [symbol] | 203 | [symbol] | 1570 | 2273 | [symbol] |
| [symbol] | | | 170 | | | | | 1002 | 3027 | 0 | 0 | 0 | [symbol] | [symbol] | [symbol] | [symbol] |
| [symbol] | | | [symbol] | | | | | [symbol] | [symbol] | [symbol] | [symbol] | 0 | 0 | [symbol] | [symbol] | [symbol] |
| [symbol] | | | [symbol] | | | | | 0 | [symbol] | 0 | [symbol] | 70 | [symbol] | [symbol] | 0 | [symbol] |
| [symbol] | | | 100 | | | | | [symbol] | 7336 | 0 | 37 | 0 | 0 | [symbol] | 0 | [symbol] |
| [symbol] | | | [symbol] | | | | | [symbol] | [symbol] | 0 | 130 | 104 | [symbol] | [symbol] | [symbol] | [symbol] |
| [symbol] | | | 207 | | | | | [symbol] | [symbol] | [symbol] | [symbol] | [symbol] | [symbol] | [symbol] | [symbol] | [symbol] |
| [symbol] | | | [symbol] | | | | | 0 | [symbol] | [symbol] | [symbol] | [symbol] | [symbol] | [symbol] | [symbol] | [symbol] |
| [symbol] | | | 217 | | | | | 0 | 3175 | 0 | 0 | 210 | [symbol] | [symbol] | [symbol] | [symbol] |
| [symbol] | | | 224 | | | | | [symbol] | [symbol] | [symbol] | [symbol] | [symbol] | [symbol] | [symbol] | [symbol] | [symbol] |
| [symbol] | | | 226 | | | | | [symbol] | [symbol] | [symbol] | [symbol] | [symbol] | [symbol] | [symbol] | [symbol] | [symbol] |
| [symbol] | | | 228 | | | | | [symbol] | [symbol] | [symbol] | [symbol] | [symbol] | [symbol] | [symbol] | [symbol] | [symbol] |
| [symbol] | | | 230 | | | | | [symbol] | [symbol] | [symbol] | [symbol] | [symbol] | [symbol] | [symbol] | [symbol] | [symbol] |
| [symbol] | | | 234 | | | | | [symbol] | [symbol] | [symbol] | [symbol] | [symbol] | [symbol] | [symbol] | [symbol] | [symbol] |
| [symbol] | | | [symbol] | | | | | [symbol] | [symbol] | [symbol] | [symbol] | [symbol] | [symbol] | [symbol] | [symbol] | [symbol] |
| [symbol] | | | [symbol] | | | | | [symbol] | [symbol] | [symbol] | [symbol] | [symbol] | [symbol] | [symbol] | [symbol] | [symbol] |
| [symbol] | | | 301 | | | | | [symbol] | [symbol] | [symbol] | 0 | 0 | [symbol] | [symbol] | [symbol] | [symbol] |
| [symbol] | | | [symbol] | | | | | [symbol] | [symbol] | 0 | 0 | [symbol] | [symbol] | [symbol] | [symbol] | [symbol] |
| [symbol] | | | [symbol] | | | | | 1373 | [symbol] | [symbol] | [symbol] | 21 | 1004 | [symbol] | [symbol] | [symbol] |
| [symbol] | | | [symbol] | | | | | 270 | [symbol] | 0 | [symbol] | 0 | [symbol] | [symbol] | 0 | [symbol] |
| [symbol] | | | [symbol] | | | | | 357 | 2017 | 0 | 304 | 0 | 0 | 1241 | [symbol] | [symbol] |
| [symbol] | | | [symbol] | | | | | 553 | 5137 | 0 | 0 | 0 | [symbol] | [symbol] | [symbol] | [symbol] |
| [symbol] | | | [symbol] | | | | | 0 | [symbol] | 0 | 21 | 0 | [symbol] | [symbol] | [symbol] | [symbol] |
| [symbol] | [symbol] | | | | | | | [symbol] | [symbol] | [symbol] | [symbol] | [symbol] | [symbol] | 1534 | 13700 | [symbol] |
| [symbol] | 161 | | | | | | | [symbol] | [symbol] | [symbol] | [symbol] | [symbol] | [symbol] | [symbol] | [symbol] | [symbol] |
| [symbol] | 150 | | | | | | | [symbol] | [symbol] | [symbol] | [symbol] | [symbol] | [symbol] | [symbol] | [symbol] | [symbol] |
| [symbol] | 157 | | | | | | | [symbol] | [symbol] | [symbol] | [symbol] | 1127 | [symbol] | [symbol] | [symbol] | [symbol] |
| hr5737 | 155 | | | | | | | 9 | [symbol] | 867 | [symbol] | 3447 | [symbol] | [symbol] | [symbol] | [symbol] |
| [symbol] | 153 | | | | | | | 2234 | [symbol] | [symbol] | [symbol] | [symbol] | [symbol] | [symbol] | [symbol] | [symbol] |
| MCF7 | 151 | | | | | | | [symbol] | [symbol] | [symbol] | [symbol] | [symbol] | [symbol] | [symbol] | [symbol] | [symbol] |
| [symbol] | [symbol] | | | | | | | 779 | [symbol] | 0 | 704 | 437 | 6271 | [symbol] | [symbol] | [symbol] |
| UACC257 | 147 | | | | | | | 169 | 14475 | 1430 | 740 | 183 | [symbol] | 2185 | 1031 | 2809 |
| UACC12 | 145 | | | | | | | [symbol] | [symbol] | $40 | 2105 | 4 | [symbol] | 1300 | 4231 | 41725 |
| EX142 | 144 | | | | | | | 40 | 12812 | 4444 | 577 | 779 | 8179 | 1030 | 2800 | 50031 |
| UC-31 | 143 | | | | | | | 445 | [symbol] | 1704 | [symbol] | [symbol] | 14004 | 2732 | 2034 | [symbol] |
| [symbol] | 142 | | | | | | | 1182 | 2782 | [symbol] | 7044 | 2900 | 13105 | 1215 | 9005 | 42911 |
| UCM-12 | 141 | | | | | | | 325 | 5737 | 2512 | 104 | 0 | [symbol] | 1317 | 64 | [symbol] |
| [symbol] | 140 | | | | | | | 1557 | 14400 | 2231 | 796 | 1827 | 7340 | 1575 | 7479 | 67511 |
| HCT-15 | 130 | | | | | | | 740 | 12275 | 771 | 687 | 996 | 4821 | 2007 | 7421 | 71185 |
| [symbol] | 134 | | | | | | | 1725 | 25043 | 2545 | 2391 | 2583 | 10072 | 2036 | 7221 | 42987 |
| COLO204 | 137 | | | | | | | 2434 | [symbol] | 2785 | 430 | 1949 | 13401 | 1001 | 7097 | [symbol] |
| LOX [symbol] | 134 | | | | | | | 203 | 37437 | 202 | 3161 | 4330 | 30430 | 402 | 1061 | [symbol] |
| [symbol] | 135 | | | | | | | [symbol] | 6511 | 0 | 1407 | [symbol] | [symbol] | [symbol] | [symbol] | [symbol] |
| TR [symbol] | 134 | | | | | | | 545 | 6427 | 1317 | 1524 | 1082 | [symbol] | 1711 | 11301 | 42230 |
| HCT115 | 133 | | | | | | | 1016 | 7308 | 0 | 140 | 413 | 11724 | 2913 | [symbol] | $4 |
| 794-4 | 132 | | | | | | | 636 | 8319 | 827 | 1162 | 747 | [symbol] | 1479 | 7153 | 41433 |
| HCC-2000 | 131 | | | | | | | 1700 | 2340 | 0 | [symbol] | 1115 | 3212 | 1584 | 3254 | 71444 |
| AC [symbol] | 130 | | | | | | | 600 | [symbol] | 1424 | 1233 | 405 | 21377 | 1408 | 7023 | 48774 |
| PC-3 | 129 | | | | | | | 577 | [symbol] | 0 | 33 | [symbol] | 14200 | 1430 | 3151 | 46670 |
| [symbol] | 128 | | | | | | | 1047 | 12023 | 1508 | 4327 | 377 | 29444 | [symbol] | 13036 | 43831 |
| [symbol] | 127 | | | | | | | 1200 | 1043 | 100 | 125 | 175 | [symbol] | 2170 | [symbol] | [symbol] |
| C [symbol] 1 | 126 | | | | | | | 201 | 13870 | [symbol] | [symbol] | 334 | [symbol] | 1833 | 15823 | 42579 |
| SA | 125 | | | | | | | 0 | [symbol] | 0 | [symbol] | 357 | 1134 | 2004 | 4030 | 44677 |
| [symbol] | 124 | | | | | | | 8313 | 19949 | 351 | 295 | 0 | 14125 | 2475 | 10 [symbol] | [symbol] |
| RPLA1225 | 123 | | | | | | | 0 | [symbol] | 0 | 1 | 112 | 590 | 2000 | 5704 | 63175 |
| 3N12C | 122 | | | | | | | 0 | 17323 | 0 | 2902 | 134 | 5734 | 2441 | 10677 | [symbol] |
| HL-90 | 121 | | | | | | | 303 | 4211 | 541 | 116 | 240 | 1354 | 2057 | 2399 | [symbol] |
| MCIT-4 | 120 | | | | | | | 226 | 4494 | 2178 | 551 | 111 | 5801 | 1313 | 7213 | 70180 |
| [symbol] | 119 | | | | | | | 854 | 10544 | 6273 | 2442 | 677 | 12121 | [symbol] | 23428 | 40594 |
| K-852 | 118 | | | | | | | 1044 | 48121 | 2214 | [symbol] | [symbol] | 5279 | 1771 | [symbol] | [symbol] |
| OVCAR-4 | 117 | | | | | | | 21340 | 13447 | 4368 | 240 | 3540 | 14315 | 1400 | 21304 | [symbol] |
| CCRF-CEM | 116 | | | | | | | [symbol] | 31473 | [symbol] | 4834 | [symbol] | 4841 | 1450 | 7736 | $4 |
| OVCAR-3 | 115 | | | | | | | 543 | [symbol] | 2364 | 1091 | 119 | 3448 | 1421 | 45004 | 42391 |
| SF-530 | 114 | | | | | | | 1113 | 7236 | 0 | [symbol] | 834 | 10017 | 1247 | 4954 | 41079 |
| HCR [symbol] | 113 | | | | | | | 0 | 6295 | 2042 | 6254 | 47 | 16794 | [symbol] | [symbol] | [symbol] |
| SF-296 | 112 | | | | | | | 209 | 7254 | 304 | 1051 | 2774 | 8751 | 675 | [symbol] | 47319 |
| AS [symbol] TCC | 111 | | | | | | | 1371 | 14734 | 0 | 3749 | 2418 | 18206 | 1203 | [symbol] | [symbol] |
| SF-282 | 110 | | | | | | | 1377 | 11909 | 0 | 2303 | 1054 | 18314 | 1000 | 8470 | $4 |
| NCH622 | 109 | | | | | | | 325 | 10129 | 1948 | 3305 | 1283 | 17942 | 3094 | 15205 | [symbol] |
| [symbol] | 108 | | | | | | | 1614 | 9800 | 2187 | 374 | 1011 | 2018 | 2229 | 1000 | [symbol] |
| [symbol] | 107 | | | | | | | [symbol] | 11864 | [symbol] | [symbol] | 830 | [symbol] | [symbol] | [symbol] | [symbol] |
| SNB-75 | 106 | | | | | | | 252 | 7303 | 127 | 623 | 25 | 20030 | 1048 | 1500 | 40300 |
| [symbol] | 105 | | | | | | | 2683 | 13987 | 3336 | 3617 | 473 | 11000 | [symbol] | [symbol] | [symbol] |
| [symbol] | 104 | | | | | | | 0 | 7540 | 1418 | [symbol] | 329 | [symbol] | [symbol] | 6129 | 52719 |
| HCHH226 | 103 | | | | | | | 823 | 19491 | 1502 | 2302 | 372 | 7883 | 4474 | 13435 | 103482 |
| [symbol] | 102 | | | | | | | 0 | [symbol] | 471 | 740 | 482 | 5154 | 2796 | 5302 | 55779 |
| HCH4427 | 101 | | | | | | | 872 | 12835 | 1794 | 6027 | 715 | 1791 | 3125 | 30347 | 54491 |
| [symbol] | 100 | | | | | | | 672 | 10001 | 3057 | 275 | 665 | 3254 | 3272 | 7799 | 54479 |
| EKVX | 99 | | | | | | | 0 | [symbol] | [symbol] | [symbol] | 217 | 4085 | 3078 | 31152 | 43479 |
| OVCAR-8 | 98 | | | | | | | 347 | 7231 | 2432 | 897 | 870 | 8534 | 1949 | 4820 | [symbol] |
| HOP-82 | 97 | | | | | | | 474 | 12057 | [symbol] | [symbol] | 782 | 12342 | 2345 | 31301 | [symbol] |
| [symbol] | 48 | | | | | | | 1806 | 4800 | 0 | 3634 | 315 | 34750 | 1914 | 5355 | [symbol] |
| [symbol] | 47 | | | | | | | 37 | 3434 | 0 | 477 | 80 | [symbol] | [symbol] | [symbol] | [symbol] |
| [symbol] | 46 | | | | | | | 4753 | 10427 | 0 | 2520 | 7034 | [symbol] | 1175 | 5191 | [symbol] |
| TOOP | 38 | | | | | | | 0 [symbol] | 13483 | 55 | 30915 | 701 | [symbol] | 2429 | 0414 | 11036 |
| ASAS-1 | | | | | | | [symbol] | 0 | 2004 | [symbol] | 13218 | 0 | 1876 | 331 | 14999 | 18283 |
| ASAS-3 | | | | | | | [symbol] | 0 | 2582 | 0 | 263 | 0 | 317 | 314 | 3467 | 10191 |
| ASAS-4 | | | | | | | [symbol] | 0 | 3700 | 0 | [symbol] | 0 | 573 | 117 | 11425 | 10082 |
| ASAS-5 | | | | | | | [symbol] | 0 | 4477 | 0 | 2173 | 0 | 400 | 242 | 15449 | 13282 |
| ASAS-7 | | | | | | | [symbol] | 0 | 3411 | 0 | 578 | 0 | 1883 | 291 | 12240 | 20201 |
| EKVX-1 | | | | | | | [symbol] | 0 | 7918 | 278 | 10025 | 0 | 2348 | 602 | 27454 | 14030 |
| EKVX-4 | | | | | | | [symbol] | 0 | 5808 | 0 | 7480 | 0 | 3883 | 1803 | 78164 | [symbol] |
| EKVX-3 | | | | | | | [symbol] | 0 | 4165 | 0 | 6533 | 0 | 1342 | 347 | 7116 | [symbol] |
| EKVX-8 | | | | | | | [symbol] | 0 | 2042 | 442 | 1804 | 0 | 2088 | 781 | 18042 | 27344 |
| EKVX-7 | | | | | | | [symbol] | 0 | [symbol] | 3404 | 40 | 0 | 1233 | 1394 | 1345 | [symbol] |
| MCF-7-1 | | | | | | | [symbol] | 0 | 2495 | 0 | 3485 | 0 | 386 | 267 | 11222 | 16811 |
| MCF-7-3 | | | | | | | [symbol] | 0 | 4324 | 0 | 7219 | 0 | 177 | 321 | 10076 | 14247 |
| MCF-7-4 | | | | | | | [symbol] | 0 | [symbol] | 862 | 237 | 0 | 707 | 191 | [symbol] | 19080 |
| MCF-7-5 | | | | | | | [symbol] | 0 | 4641 | 0 | 312 | 0 | 0 | 80 | 24357 | 14439 |
| MCF-7-7 | | | | | | | [symbol] | 0 | 2971 | 0 | 341 | 0 | 300 | 119 | 9134 | 14350 |
| ADA-RES-1 | | | | | | | [symbol] | 0 | 13125 | 0 | [symbol] | 0 | 1135 | [symbol] | 43482 | 43329 |
| ADA-RES-3 | | | | | | | [symbol] | 0 | [symbol] | 206 | [symbol] | 0 | 583 | 715 | 8379 | 15027 |
| ADA-RES-4 | | | | | | | [symbol] | 0 | [symbol] | 812 | 79 | 0 | 7847 | [symbol] | [symbol] | 22904 |
| ADA-RES-5 | | | | | | | [symbol] | 0 | [symbol] | 0 | [symbol] | 0 | 572 | 115 | [symbol] | [symbol] |
| ADA-RES-7 | | | | | | | [symbol] | 0 | [symbol] | 0 | [symbol] | 0 | 835 | 310 | [symbol] | 17945 |
| [symbol] -1 | | | | | | | [symbol] | 0 | [symbol] | 0 | 1743 | 0 | 490 | [symbol] | [symbol] | 25030 |
| [symbol] -3 | | | | | | | [symbol] | 0 | [symbol] | 317 | [symbol] | 0 | 2774 | 777 | 23794 | 13274 |
| [symbol] -4 | | | | | | | [symbol] | 0 | 8701 | 0 | [symbol] | 0 | [symbol] | 794 | 23304 | 14200 |
| [symbol] -5 | | | | | | | [symbol] | 0 | [symbol] | 0 | [symbol] | 0 | 1877 | 750 | [symbol] | 17103 |
| [symbol] -7 | | | | | | | [symbol] | 0 | 8101 | [symbol] | [symbol] | 0 | [symbol] | 1033 | [symbol] | 13302 |
| [symbol] -1 | | | | | | | [symbol] | 0 | 2972 | 1045 | 125 | 0 | 783 | 341 | [symbol] | 13205 |
| [symbol] -3 | | | | | | | [symbol] | 0 | 6135 | 209 | 2900 | 0 | [symbol] | 304 | 15037 | 12311 |
| [symbol] -4 | | | | | | | [symbol] | 0 | [symbol] | 787 | 1330 | 0 | [symbol] | 419 | [symbol] | 10755 |
| [symbol] -5 | | | | | | | [symbol] | 0 | 8774 | 343 | 2004 | 0 | 2129 | 834 | [symbol] | 18512 |
| [symbol] -7 | | | | | | | [symbol] | 0 | 8057 | 0 | 1004 | 0 | 1573 | 840 | [symbol] | 19167 |
| [symbol] -1 | | | | | | | [symbol] | 0 | 5732 | 0 | [symbol] | 0 | 400 | 783 | 13204 | 13627 |
| [symbol] -3 | | | | | | | [symbol] | 0 | [symbol] | 0 | [symbol] | 0 | [symbol] | 547 | [symbol] | 17407 |
| [symbol] -4 | | | | | | | [symbol] | 0 | 11579 | 0 | 2003 | 0 | [symbol] | 567 | [symbol] | 19523 |
| [symbol] -5 | | | | | | | [symbol] | 0 | [symbol] | 0 | 2000 | 0 | 1547 | 553 | [symbol] | 17747 |
| [symbol] -7 | | | | | | | [symbol] | 0 | [symbol] | 67 | 2047 | 0 | [symbol] | 534 | 13374 | 13714 |
| [symbol] -2 | | | | | | | [symbol] | 0 | 1774 | 0 | 7823 | 0 | [symbol] | 473 | 3747 | 14537 |
| [symbol] -2 | | | | | | | [symbol] | 0 | 4310 | 0 | [symbol] | 0 | [symbol] | 344 | 14174 | [symbol] |
| [symbol] -1 | | | | | | | [symbol] | 0 | [symbol] | 0 | 1131 | 0 | [symbol] | [symbol] | 13342 | 12401 |
| [symbol] -2 | | | | | | | [symbol] | 0 | 15450 | 0 | [symbol] | 0 | [symbol] | [symbol] | [symbol] | [symbol] |
| [symbol] -2 | | | | | | | [symbol] | 0 | 3414 | [symbol] | [symbol] | 0 | [symbol] | 541 | [symbol] | [symbol] |
| [symbol] -1 | | | | | | | [symbol] | 0 | [symbol] | 167 | 302 | 0 | 774 | 285 | [symbol] | 14833 |
| [symbol] -2 | | | | | | | [symbol] | 0 | [symbol] | 0 | 813 | 0 | 0 | 247 | [symbol] | 18521 |
| [symbol] - | | | | | | | [symbol] | 0 | [symbol] | 0 | 1104 | 0 | [symbol] | 1129 | [symbol] | 14395 |
| [symbol] -2 | | | | | | | [symbol] | 0 | 6717 | 0 | 10047 | 0 | 3007 | 1179 | [symbol] | 34251 |
| [symbol] 4-1 | | | | | | | [symbol] | 0 | [symbol] | 704 | 1307 | 0 | [symbol] | 878 | [symbol] | [symbol] |
| [symbol] 4-2 | | | | | | | [symbol] | 0 | [symbol] | [symbol] | 3777 | 0 | 1872 | 843 | [symbol] | 11007 |
| [symbol] 5-1 | | | | | | | [symbol] | 0 | 3130 | [symbol] | 334 | 0 | 851 | [symbol] | [symbol] | 11500 |
| [symbol] 5-2 | | | | | | | [symbol] | 0 | [symbol] | 0 | 829 | 0 | 344 | 270 | [symbol] | 11700 |
| [symbol] -2 | | | | | | | [symbol] | 0 | [symbol] | 281 | 4447 | 0 | [symbol] | 122 | [symbol] | [symbol] |
| [symbol] -2 | | | | | | | [symbol] | 0 | [symbol] | 0 | 2034 | 0 | 814 | 834 | [symbol] | [symbol] |
| [symbol] -2 | | | | | | | [symbol] | 0 | [symbol] | [symbol] | [symbol] | 0 | 4434 | 842 | 40773 | [symbol] |
| [symbol] -1 | | | | | | | [symbol] | 0 | [symbol] | 33 | 2311 | 0 | [symbol] | 1162 | [symbol] | [symbol] |
| [symbol] -2 | | | | | | | [symbol] | 0 | [symbol] | 0 | [symbol] | 0 | 915 | 534 | [symbol] | [symbol] |
| [symbol] -2 | | | | | | | [symbol] | 0 | [symbol] | 0 | [symbol] | 0 | 1503 | 844 | [symbol] | 34461 |
| [symbol] -1 | | | | | | | [symbol] | 0 | [symbol] | 0 | 0 | 0 | 570 | 230 | [symbol] | 12314 |
| [symbol] -2 | | | | | | | [symbol] | 0 | [symbol] | 404 | 429 | 0 | 970 | 200 | [symbol] | [symbol] |
| [symbol] -1 | | | | | | | [symbol] | 0 | [symbol] | 0 | [symbol] | 0 | 2310 | [symbol] | [symbol] | 31144 |
| [symbol] -2 | | | | | | | [symbol] | 0 | [symbol] | 743 | 8373 | 0 | [symbol] | 1031 | [symbol] | 27447 |
| [symbol] -1 | | | | | | | [symbol] | 0 | 7177 | 447 | [symbol] | 0 | 1155 | 415 | 11483 | [symbol] |
| [symbol] -2 | | | | | | | [symbol] | 0 | [symbol] | 403 | 2004 | 0 | 3334 | 745 | [symbol] | 17007 |
| [symbol] -2 | | | | | | | [symbol] | 0 | [symbol] | [symbol] | 1083 | 0 | [symbol] | 732 | [symbol] | 13250 |
| [symbol] -1 | | | | | | | | 0 | [symbol] | 0 | 2714 | 0 | 1113 | 300 | [symbol] | 14813 |
| [symbol] -2 | | | | | | | | 0 | 12729 | 0 | 126 | 0 | [symbol] | 300 | [symbol] | [symbol] |
| [symbol] -3 | | | | | | | | 0 | [symbol] | 0 | 354 | 0 | [symbol] | 400 | 44133 | [symbol] |
| [symbol] -4 | | | | | | | | 0 | [symbol] | 0 | 0 | 0 | [symbol] | 500 | 4312 | 22074 |
| [symbol] -5 | | | | | | | | 0 | 2003 | 0 | 0 | 0 | 0 | 404 | 0 | [symbol] |
| [symbol] | | | | | | | | 0 | 13424 | 0 | 0 | 0 | 3344 | 1234 | [symbol] | [symbol] |
| [symbol] | | | | | | | | 0 | 15247 | 0 | 1442 | 0 | 3704 | [symbol] | [symbol] | [symbol] |
| [symbol] | | | | | | | | 0 | 12139 | 0 | 309 | 0 | 2077 | 1999 | [symbol] | [symbol] |
| D [symbol] 7 | | | | | | | | 0 | [symbol] 7 [symbol] | 3124 | 2233 | 0 | 2724 | 1021 | 10438 | 11243 |
| D [symbol] -4 | | | | | | | | 0 | 33351 | 84 | 33 [symbol] | 0 | 3479 | [symbol] | 2370 | 14 [symbol] 61 |
| D [symbol] -5 | | | | | | | | 0 | 22317 | 0 | 4238 | 0 | 4247 | 704 | 52752 | 12234 |
| D [symbol] -11 | | | | | | | | 0 | 42 [symbol] | 0 | 4722 | 0 | 327 [symbol] | 1044 | 48334 | 73174 |
| D [symbol] -12 | | | | | | | | 0 | 14274 | 0 | 1457 | 0 | 2734 | [symbol] | 60043 | 11302 |
| D [symbol] -10 | | | | | | | | 0 | 1 [symbol] 15 | 0 | 13 [symbol] | 0 | 4270 | 841 | 34042 | 11401 |
| D [symbol] -1 | | | | | | | | 0 | 11734 | 0 | 21443 | 0 | 3074 | 1022 | 20301 | 22 [symbol] |
| D [symbol] -2 | | | | | | | | 0 | 1337 | 0 | 13705 | 0 | 1120 | 783 | 15242 | 14134 |
| D [symbol] -3 | | | | | | | | 0 | [symbol] 5 | 1171 | [symbol] 13 | 0 | 103 | 123 | 31807 | 2 [symbol] |
| D [symbol] -4 | | | | | | | | 0 | [symbol] | 0 | 550 | 0 | 1704 | 480 | 30143 | 23124 |
| D [symbol] -5 | | | | | | | | 0 | 3723 | 0 | 215 | 0 | [symbol] | 6 [symbol] | 1831 | 12344 |
| D [symbol] -6 | | | | | | | | 0 | [symbol] | 0 | 0 | 0 | 485 | 452 | 1823 | [symbol] |
| A [symbol] -4 | | | | | | | wt | 0 | 4318 | 537 | 1575 | 0 | 2240 | 304 | 18012 | 13423 |
| EXVX-4 | | | | | | | [symbol] | 0 | 4743 | 0 | 4381 | 0 | 4341 | 102 | 24283 | 14 [symbol] |
| HCT-114-7 | | | | | | | wt | 0 | 2845 | 507 | [symbol] | 0 | 512 | 478 | 8413 | 12443 |
| HCT-114-8 | | | | | | | wt | 0 | 2144 | 3418 | [symbol] | 0 | 382 | 381 | 11432 | 14 [symbol] 04 |
| HT29-1 | | | | | | | [symbol] | 0 | 2414 | 0 | 1343 | 0 | 1404 | 431 | 23418 | 21731 |
| HT29-7 | | | | | | | [symbol] | 0 | 1283 | 0 | 64 | 0 | 307 | 375 | 5185 | 13142 |
| HT29-8 | | | | | | | [symbol] | 0 | 4333 | 0 | 2552 | 0 | 702 | [symbol] | 14207 | [symbol] |
| 4F [symbol] -7 | | | | | | | wt | 0 | [symbol] 02 | 0 | [symbol] | 0 | 1074 | 1025 | 12404 | 17428 |
| 3F [symbol] -8 | | | | | | | wt | 0 | [symbol] 54 | 0 | 130 | 0 | 544 | 011 | 14374 | [symbol] |
| 3F [symbol] -7 | | | | | | | [symbol] | 0 | [symbol] 10 | 14 [symbol] | 708 | 0 | 1316 | 420 | 14244 | 15443 |
| 3F [symbol] -8 | | | | | | | [symbol] | 0 | 8205 | 0 | 709 | 0 | [symbol] | 811 | [symbol] | [symbol] |
| OVCAR-4-7 | | | | | | | wt | 0 | 1744 | 0 | [symbol] | 0 | [symbol] | 420 | [symbol] | [symbol] |
| OVCAR-4-8 | | | | | | | wt | 0 | 4200 | [symbol] | 307 | 0 | [symbol] | [symbol] | [symbol] | [symbol] |
| OVCAR-4-7 | | | | | | | [symbol] | 0 | 4231 | 0 | 12121 | 0 | [symbol] | 730 | [symbol] | [symbol] |
| OVCAR-5-8 | | | | | | | [symbol] | 0 | 3470 | 17044 | 1790 | 0 | [symbol] | 1330 | [symbol] | [symbol] |
| [symbol] | | | | | | | wt | 0 | 4347 | 348 | 48 | 0 | [symbol] | [symbol] | [symbol] | [symbol] |
| AOR- [symbol] -4 | | | | | | | [symbol] | 0 | 4033 | 485 | 2805 | 0 | [symbol] | 451 | [symbol] | [symbol] |
| [symbol] -8 | | | | | | | [symbol] | 0 | 4132 | 914 | 1079 | 0 | [symbol] | [symbol] | [symbol] | [symbol] |
| [symbol] -7 | | | | | | | [symbol] | 0 | 3841 | 850 | [symbol] | 0 | [symbol] | 704 | [symbol] | [symbol] |
| SW480-8 | | | | | | | [symbol] | 0 | 3005 | [symbol] | 1133 | 0 | [symbol] | 212 | [symbol] | [symbol] |
| SW480-9 | | | | | | | [symbol] | 0 | 5441 | 8374 | 1442 | 0 | [symbol] | 450 | [symbol] | [symbol] |
| C33A-7 | | | | | | | [symbol] | 0 | 4445 | 0 | 131 | 0 | [symbol] | [symbol] | [symbol] | [symbol] |
| C33A-8 | | | | | | | [symbol] | 0 | 4384 | 0 | 853 | 0 | [symbol] | 231 | [symbol] | [symbol] |
| C33A-7 | | | | | | | [symbol] | 0 | [symbol] 43 | [symbol] | 1821 | 0 | [symbol] | 1472 | [symbol] | [symbol] |
| U2O5-8 | | | | | | | [symbol] | 0 | 4223 | 187 | 482 | 0 | [symbol] | [symbol] | [symbol] | [symbol] |
| U2O5-7 | | | | | | | wt | 0 | 4235 | 17844 | 1101 | 0 | [symbol] | 614 | [symbol] | [symbol] |
| H [symbol] -8 | | | | | | | wt | 0 | 4438 | 0 | 0 | 0 | [symbol] | 614 | [symbol] | 18314 |
| H [symbol] -8 | | | | | | | wt | 0 | [symbol] | 0 | [symbol] | 322 | [symbol] | [symbol] | [symbol] | 17704 |
| 414 [symbol] | | | | | | | | 218 | 10478 | 78 | 471 | [symbol] | [symbol] | [symbol] | 4323 | [symbol] |
| CR 1572 317 | | | | | | | | 0 | 1424 | 0 | 182 | 238 | [symbol] | [symbol] | [symbol] | [symbol] |
| [symbol] | | | | | | 54 | | 1350 | 7174 | 308 | 48 | 43 | [symbol] | [symbol] | 13124 | [symbol] |
| HT348 | | | | | | | | 415 | 10973 | 0 | 187 | 825 | 0 | 2041 | [symbol] | [symbol] |
| HT370 | | | | | | | | 244 | 1570 | 1052 | 0 | 147 | 4171 | [symbol] | [symbol] | [symbol] |
| HT385 | | | | | | | | 2 [symbol] 4 | 23774 | 0 | 68 | 40 | 1211 | 1344 | 2271 | [symbol] |
| HT [symbol] | | | | | | | | 484 | 4382 | 0 | [symbol] | 0 | 870 | [symbol] | [symbol] | [symbol] |
| [symbol] -3 | | | | | | 173 | | 142 | 2823 | 0 | [symbol] | 0 | 1075 | [symbol] | 2813 | [symbol] |
| [symbol] -4 | | | | | | 175 | | 1224 | 107 | 815 | 0 | 878 | 1984 | [symbol] | [symbol] | [symbol] |
| [symbol] -5 | | | | | | 177 | | 0 | 1832 | 0 | 95 | 31 | 1453 | [symbol] | 783 | 37803 |
| [symbol] | | | | | | | | 4 | 8302 | 811 | 827 | 0 | 83 | [symbol] | 280 | 44307 |
| [symbol] | | | | | | 237 | | 1100 | 23331 | [symbol] 0 | 30 | 0 | 3 | [symbol] | [symbol] | [symbol] |
| MTB10 | | | | | | | | 0 | [symbol] 54 | [symbol] | 157 | 47 | 1031 | 8317 | 797 | 84103 |
| [symbol] 33142 [symbol] 2 | | | | | | | | 144 | 4732 | [symbol] | 300 | [symbol] | 1233 | [symbol] | [symbol] | [symbol] |
| [symbol] | | | | | | | | 87 | 100 | 0 | 191 | 1874 | 504 | [symbol] | 0 | [symbol] |
| [symbol] -OS [symbol] | | | | | | | | 0 | 4870 | 0 | [symbol] | 1131 | 1543 | [symbol] | [symbol] | [symbol] |
| 6A-OS [symbol] A | | | | | | | | [symbol] | 31232 | 830 | [symbol] | 0 | 840 | [symbol] | [symbol] | [symbol] |
| [symbol] A | | | | | | | | 272 | 20543 | 177 | [symbol] | 0 | 2913 | [symbol] | [symbol] | [symbol] |
| HCT-114-3 | | | | | | | wt | 0 | 2244 | [symbol] | 724 | 0 | 4200 | 247 | [symbol] | [symbol] |
| HCT-114-4 | | | | | | | wt | 0 | 347 | 1378 | 724 | 0 | [symbol] | [symbol] | [symbol] | [symbol] |
| HCT-114-5 | | | | | | | wt | 0 | 5154 | 0 | 2977 | 0 | [symbol] | [symbol] | [symbol] | [symbol] |
| HCT-114-6 | | | | | | | wt | 0 | 777 | 1117 | 42 | 0 | 477 | 315 | [symbol] | [symbol] |
| A34-8 | | | | | | | wt | 0 | 3371 | 80 | 7344 | 0 | [symbol] | 311 | [symbol] | [symbol] |
| HT29-3 | | | | | | | [symbol] | 0 | 879 | 1434 | 0 | 0 | [symbol] | [symbol] | [symbol] | [symbol] |
| EXVX-6 | | | | | | | [symbol] | 0 | 771 | 1300 | 875 | 0 | [symbol] | [symbol] | [symbol] | [symbol] |
| HT29-4 | | | | | | | [symbol] | 0 | 3428 | 811 | 4091 | 0 | [symbol] | 1083 | [symbol] | [symbol] |
| HT29-5 | | | | | | | [symbol] | 0 | 3134 | 1824 | 2404 | 0 | [symbol] | [symbol] | [symbol] | 27134 |
| HT29-6 | | | | | | | [symbol] | 0 | [symbol] | 0 | 4734 | 0 | 1303 | 230 | 28341 | [symbol] |
| OVCAR-3 | | | | | | | wt | 0 | [symbol] | 1901 | 1104 | 0 | 143 | [symbol] | [symbol] | [symbol] |
| OVCAR-4 | | | | | | | wt | 0 | [symbol] | [symbol] | 4205 | 0 | [symbol] | 373 | [symbol] | [symbol] |
| OVCAR-5 | | | | | | | wt | 0 | 3487 | 177 | 0 | 0 | [symbol] | 64 | [symbol] | 14135 |
| OVCAR-6 | | | | | | | wt | 0 | 12820 | 436 | 704 | 0 | 7830 | [symbol] | [symbol] | 15744 |
| [symbol] -3 | | | | | | | wt | 0 | [symbol] | [symbol] | 294 | 0 | 829 | [symbol] | [symbol] | [symbol] |
| [symbol] -4 | | | | | | | wt | 0 | [symbol] | 0 | 459 | 0 | 413 | 332 | [symbol] | 10033 |
| [symbol] -5 | | | | | | | wt | 0 | 11231 | [symbol] | 0 | 0 | 642 | [symbol] | [symbol] | [symbol] |
| [symbol] -6 | | | | | | | wt | 0 | 12348 | 0 | 1341 | 0 | 2321 | 27 | 14823 | 20785 |
| OVCAR-3 | | | | | | | [symbol] | 0 | 5756 | 0 | 1981 | 0 | 1507 | [symbol] | [symbol] | 14804 |
| OVCAR-4 | | | | | | | [symbol] | 0 | 4324 | 326 | [symbol] | 0 | [symbol] | [symbol] | 8731 | [symbol] |
| OVCAR-5 | | | | | | | [symbol] | 0 | [symbol] | 0 | 1852 | 0 | [symbol] | [symbol] | 310 | 11271 |
| OVCAR-6 | | | | | | | [symbol] | 0 | [symbol] | 0 | 322 | 0 | [symbol] | 141 | [symbol] | [symbol] |
| [symbol] | | | | | | | wt | 0 | 3371 | 70 | 2138 | 0 | 0 | [symbol] | [symbol] | 19834 |
| [symbol] | | | | | | | [symbol] | 0 | [symbol] | 0 | 10 | 0 | 1130 | [symbol] | [symbol] | [symbol] |
| [symbol] | | | | | | | [symbol] | 0 | [symbol] | 0 | [symbol] | 0 | 1108 | [symbol] | [symbol] | [symbol] |
| [symbol] -3 | | | | | | | [symbol] | 0 | 1457 | [symbol] | [symbol] | 0 | 393 | [symbol] | [symbol] | [symbol] |
| [symbol] -4 | | | | | | | [symbol] | 0 | 1242 | 0 | [symbol] | 0 | 481 | [symbol] | [symbol] | [symbol] |
| [symbol] -5 | | | | | | | [symbol] | 0 | 4786 | 184 | 1304 | 0 | 1516 | [symbol] | 37823 | 14105 |
| [symbol] -6 | | | | | | | [symbol] | 0 | 7887 | 0 | 484 | 0 | 0 | 173 | 30247 | 17087 |
| C33A-3 | | | | | | | [symbol] | 0 | 4159 | 0 | 831 | 0 | [symbol] | [symbol] | [symbol] | 7717 |
| C33A-4 | | | | | | | [symbol] | 0 | 4870 | [symbol] | [symbol] | 0 | [symbol] | [symbol] | 11378 | [symbol] |
| C33A-5 | | | | | | | [symbol] | 0 | 2983 | [symbol] | 0 | 0 | 1129 | [symbol] | [symbol] | [symbol] |
| C33A-6 | | | | | | | [symbol] | 0 | 4237 | 4219 | 344 | 0 | 457 | [symbol] | [symbol] | [symbol] |
| [symbol] | | | | | | | wt | 0 | 1801 | 0 | [symbol] | 0 | [symbol] | 473 | [symbol] | [symbol] |
| [symbol] -3 | | | | | | | [symbol] | 0 | [symbol] | 837 | [symbol] | 0 | 1449 | [symbol] | [symbol] | [symbol] |
| [symbol] -4 | | | | | | | [symbol] | 0 | 4249 | 10235 | $ | 0 | [symbol] | 475 | [symbol] | 23270 |
| [symbol] -5 | | | | | | | [symbol] | 0 | [symbol] | 1853 | 0 | 0 | [symbol] | [symbol] | [symbol] | 18157 |
| [symbol] -6 | | | | | | | [symbol] | 0 | 9431 | 0 | [symbol] | 0 | [symbol] | 540 | [symbol] | [symbol] |
| [symbol] -6 | | | | | | | wt | 0 | 10377 | 780 | 1233 | 0 | [symbol] | 340 | [symbol] | [symbol] |
| [symbol] -3 | | | | | | | wt | 0 | 17277 | 0 | 3974 | 0 | 3412 | 1982 | [symbol] | [symbol] |
| [symbol] -4 | | | | | | | wt | 0 | [symbol] | 0 | 23072 | 0 | 3413 | [symbol] | [symbol] | [symbol] |
| [symbol] -3 | | | | | | | [symbol] | 0 | [symbol] | 0 | 11184 | 0 | 1910 | [symbol] | [symbol] | 18347 |
| [symbol] -4 | | | | | | | [symbol] | 0 | 13125 | 0 | [symbol] | 0 | 1248 | 1137 | [symbol] | [symbol] |
| [symbol] -5 | | | | | | | [symbol] | 0 | 4084 | 0 | 0 | 0 | 814 | [symbol] | 2400 | [symbol] |
| [symbol] -6 | | | | | | | [symbol] | 0 | [symbol] | 0 | [symbol] | 0 | 318 | [symbol] | 32104 | [symbol] |
| [symbol] -13 | | | | | | | | 0 | [symbol] | 0 | [symbol] | 0 | [symbol] | 740 | [symbol] | 20303 |
| [symbol] -20 | | | | | | | | 0 | 14080 | 0 | [symbol] | 0 | 2419 [symbol] | 777 | 18057 | [symbol] |
| [symbol] 21 | | | | | | | | 0 | 13873 | 0 | 3178 | 0 | [symbol] | [symbol] | [symbol] | [symbol] |
| [symbol] 22 | | | | | | | | 0 | [symbol] | 0 | [symbol] | 0 | [symbol] | [symbol] | [symbol] | 18178 |
| OVCAR4-5 | | | | | | | [symbol] | 0 | 4712 | 0 | [symbol] | 0 | [symbol] | [symbol] | [symbol] | 7830 |
| [symbol] -10 | | | | | | | | 0 | 4712 | 0 | 3078 | | [symbol] 34 | [symbol] 7 | 1837 | [symbol] |
| [symbol] -11 | | | | | | | | 0 | 8270 | 0 | 4705 | 0 | [symbol] | [symbol] | [symbol] | 4271 |
| [symbol] -12 | | | | | | | | 0 | 10544 | 0 | [symbol] | 0 | 2390 | [symbol] | 42037 | [symbol] |
| [symbol] -13 | | | | | | | | 0 | [symbol] | 0 | [symbol] | 0 | 1883 | 810 | 43027 | [symbol] |
| [symbol] -14 | | | | | | | | 0 | 18318 | 0 | [symbol] | 0 | 432 | 1228 | [symbol] | 17823 |
| [symbol] -15 | | | | | | | | 0 | 70792 | 0 | [symbol] | 0 | 834 | [symbol] | [symbol] | 13732 |
| [symbol] -16 | | | | | | | | 0 | 7517 | 0 | 54 | 0 | 1777 | 710 | 18220 | 12001 |
| [symbol] -17 | | | | | | | | 0 | 9720 | 0 | [symbol] | 0 | 1273 | 874 | [symbol] | [symbol] |
| [symbol] -18 | | | | | | | | 0 | [symbol] | 0 | 734 | 0 | 2844 | 1438 | [symbol] | 21852 |
| [symbol] -19 | | | | | | | | 0 | [symbol] | 0 | 0 | 0 | 1173 | 649 | 22782 | 14100 |
| adrenal gland- [symbol] | | 1 | | | | | | 0 | 238 | 14723 | 24 [symbol] 7 | [symbol] 724 | 3477 | 13 [symbol] | 2 [symbol] | 13731 |
| lymph node- [symbol] | | 2 | | | | | | 0 | [symbol] | 22295 | 2 [symbol] 336 | [symbol] | [symbol] 22 | [symbol] 8 | 281 | 22 [symbol] |
| [symbol] - [symbol] | | 3 | | | | | | 0 | [symbol] 7 | [symbol] 34 | 2 [symbol] | [symbol] | [symbol] 724 | 447 | [symbol] | 12 [symbol] 3 |
| [symbol] gland- [symbol] | | 4 | | | | | | 0 | 0 | 4322 | 2741 | 3 [symbol] 3 | 30 | 24 | 100 | 2044 |
| [symbol] | | 5 | | | | | | 0 | 0 | 114 [symbol] | 2076 | 13 [symbol] | 8167 | 3530 | 51 | 1 [symbol] 108 |
| [symbol] - [symbol] | | 6 | | | | | | 0 | 530 | [symbol] | 17022 | [symbol] 24 | 2091 | 1052 | 241 | 115 [symbol] |
| [symbol] - [symbol] | | 7 | | | | | | 0 | 234 | 1244 [symbol] | [symbol] 1638 | [symbol] 237 | [symbol] 28 | 4341 | [symbol] | 211 [symbol] |
| [symbol] gland- [symbol] | | 8 | | | | | | 127 | 162 | [symbol] 23 | [symbol] 271 [symbol] | [symbol] 3 | [symbol] 067 | 4 [symbol] 1 | 23 | 11637 |
| [symbol] - [symbol] | | 9 | | | | | | 171 | 364 | 10 [symbol] 39 | 23 [symbol] 41 | [symbol] 24 [symbol] 5 | [symbol] 45 | 91 [symbol] | 55 | 23 [symbol] |
| [symbol] - [symbol] | | 10 | | | | | | 317 | 3 [symbol] | 10004 | 742 [symbol] 4 | [symbol] 7 [symbol] 7 | 63 [symbol] | 338 | 301 | [symbol] 01 |
| [symbol] - [symbol] | | 11 | | | | | | 254 | 634 | 2011 [symbol] | 241 [symbol] | [symbol] 75 [symbol] | [symbol] 311 | [symbol] 3 | 234 | [symbol] 38 |
| [symbol] - [symbol] | | 12 | | | | | | 51 | [symbol] | 11313 | [symbol] 47 | 232 [symbol] 4 | 21 [symbol] | 13 [symbol] | 74 | 11 [symbol] 7 |
| [symbol] - [symbol] | | 13 | | | | | | 434 | 207 | 16229 | [symbol] | 11634 | 10 [symbol] 41 | 435 | 2 [symbol] 4 | [symbol] |
| [symbol] - [symbol] | | 14 | | | | | | 0 | 523 | 13 [symbol] 40 | 77 [symbol] | 1022 [symbol] | 6 [symbol] 3 | 2034 | 7 [symbol] | [symbol] 23 |
| [symbol] - [symbol] | | 15 | | | | | | 0 | [symbol] | 277 [symbol] | 1 [symbol] 719 | 15 [symbol] | [symbol] | [symbol] 75 | 177 | 13041 |
| [symbol] - [symbol] | | 16 | | | | | | 791 | 1 [symbol] | 154 [symbol] | 110 [symbol] | 194712 | [symbol] 38 | 22 [symbol] 13 | [symbol] 4 | 3341 |
| [symbol] - [symbol] | | 17 | | | | | | 2 [symbol] | 1054 | 11 [symbol] 0 [symbol] | [symbol] | [symbol] 2 [symbol] 7 | 229 [symbol] | [symbol] 7 [symbol] 1 | 0 | 4 [symbol] 1 [symbol] |
| [symbol] - [symbol] | | 18 | | | | | | 230 | 2 [symbol] | 25312 | 141 [symbol] | [symbol] 40 | 23 [symbol] | 132 [symbol] | 4 [symbol] | 757 [symbol] |
| [symbol] - [symbol] | | 19 | | | | | | 218 | [symbol] | [symbol] 142 | 18 [symbol] | 91241 | 3 [symbol] | 3 [symbol] | 0 | [symbol] 4 [symbol] |
| [symbol] - [symbol] | | 20 | | | | | | [symbol] 5 | 340 | 779 [symbol] | 11044 | 84347 | 7 [symbol] | [symbol] 7 [symbol] | 41 | 3 [symbol] 3 |
| [symbol] - [symbol] | | 21 | | | | | | 372 | 254 | [symbol] 34 | 13 [symbol] 31 | 1 [symbol] 77 | 1734 | 354 | 100 | 3 [symbol] |
| [symbol] - [symbol] | | 22 | | | | | | 79 | 2 [symbol] | [symbol] 2 | 14 [symbol] | 95 [symbol] 0 | 22 [symbol] 4 | 345 | 233 | [symbol] 0 [symbol] 3 |
| [symbol] - [symbol] | | 23 | | | | | | 179 | 542 | 16 [symbol] | 13 [symbol] 22 | [symbol] 1 [symbol] | 2203 | 337 | 143 | 5791 |
| [symbol] - [symbol] | | 24 | | | | | | 0 | 2 [symbol] | 12342 | 12134 | 71122 | [symbol] 0 [symbol] | 1227 | [symbol] | 3742 |
| [symbol] - [symbol] | | 25 | | | | | | 0 | 373 | 21347 | 23 [symbol] 43 | 1 [symbol] 40 | [symbol] | [symbol] 35 | [symbol] 2 | 2 [symbol] 00 |
| [symbol] - [symbol] | | 27 | | | | | | 177 | 496 | 21278 | 27103 | 112750 | 3483 | 700 | 290 | 3 [symbol] 7 [symbol] |
| [symbol] | | 28 | | | | 28 | | 0 | 124 | 6795 | 13179 | [symbol] 764 | 209 | [symbol] 39 | 2 [symbol] | 131 [symbol] |
| [symbol] gland- [symbol] | | 29 | | | | | | 0 | 229 | 13 [symbol] 48 | [symbol] | 11034 [symbol] | 72 [symbol] 0 | 14 [symbol] | [symbol] 2 | [symbol] 34 |
| [symbol] C | | 30 | | | | 30 | | 122 | 0 | 0 | 4 [symbol] 1 | 1157 [symbol] 0 | 11 | 372 | 7 | [symbol] 48 |
| [symbol] - [symbol] | | 31 | | | | | | 0 | 438 | 19832 | 13704 | [symbol] 718 | 2751 | 147 [symbol] | 162 | 11043 |
| [symbol] C | | 32 | | | | | | 0 | 797 | 167 [symbol] 4 | [symbol] 112 | 15 [symbol] 44 | 1037 | 304 | 471 | 20117 |
| [symbol] - [symbol] | | 33 | | | | | | 105 | 1371 | 61570 | 11723 | 84250 | 3429 | 1 [symbol] 4 | 81 | 18387 |
| HCA [symbol] C | | 34 | | | | | | 30 | 0 | 11 [symbol] 02 | 3716 | 222 [symbol] 4 | 200 | 230 | 0 | [symbol] 100 |
| [symbol] - [symbol] | | 35 | | | | | | 0 | 130 | 20403 | 2248 | 127701 | 2304 | 1034 | 0 | 7344 |
| lymph node | | 36 | | | | | | 0 | 154 | 2145 | 4941 | 17824 | [symbol] 76 | 0 | 54 | 2943 |
| [symbol] - [symbol] | | 37 | | | | | | 0 | 0 | 23 [symbol] 6 | 1 [symbol] 79 | 157218 | 302 | 613 | 0 | 3016 |
| [symbol] - [symbol] | | 38 | | | | | | 436 | 37 | 37 | 63 | [symbol] | 411 | 8 | 0 | 05 |
| Heart | | 39 | | | | | | 124 | 232 | 20524 | 4904 | 128875 | [symbol] | 23 | 233 | 4434 |
| [symbol] , [symbol] | | 40 | | | | | | 362 | 0 | 3423 | 14731 | 15 [symbol] | 423 | 184 | 0 | 4404 |
| C [symbol] - [symbol] | | 41 | | | | | | 0 | 0 | 0 | 4472 | 83230 | 76 | [symbol] 7 | [symbol] 4 | 82 [symbol] 3 |
| [symbol] - [symbol] | | 42 | | | | | | 534 | 204 | 1307 | 19012 | 1837 | 1024 | 330 | 2 [symbol] 0 | 7734 |
| Sal [symbol] - [symbol] | | 43 | | | | | | 4 | 170 | 4203 | [symbol] 25 | 1 [symbol] 0729 | 1547 | [symbol] 4 | 167 | 33 [symbol] |
| lymph- [symbol] | | 44 | | | | | | 441 | 218 | [symbol] 77 | 17243 | 23307 | 40 [symbol] 4 | 37 [symbol] | 304 | [symbol] 257 |
| HT21- [symbol] | | | | | 3 [symbol] | | | 154 | 34 | 0 | 1327 | 1011 | 0 | 384 | 40 | 2473 |
| HT21- [symbol] | | | | | 3 [symbol] | | | 0 | 0 | 0 | 1256 | 0 | 0 | 308 | [symbol] 2 | 5 [symbol] 3 |
| HT157- [symbol] | | | | | 3 [symbol] 1 | | | 44 | 0 | 0 | 3044 | 0 | 234 | 15 | 67 | 4 [symbol] 04 |
| [symbol] -13 | | | | | 364 | 356 | | 2341 | 0 | 0 | 4870 | 3 [symbol] 18 | 47 | 1438 | 140 | [symbol] 5 |
| [symbol] -12 | | | | | 364 | 354 | | 4181 | 44 | 1 [symbol] | [symbol] 004 | 3 [symbol] 3 | 530 | 475 | 243 | 1 [symbol] 145 |
| [symbol] | | | | | 344 | | | 76 | 41 | 0 | 3534 | 0 | 418 | 80 | 0 | 2922 |
| [symbol] | | | | | 342 | | | 258 | 148 | 230 | 2481 | 0 | 228 | 97 | 0 | 2043 |
| RFTEC | | | | | 334 | 334 | | 290 | 0 | 0 | 8453 | 4946 | 0 | 423 | 0 | 2443 |
| lymph node- [symbol] | | | | | 332 | | | 15 | 0 | 0 | 19034 | 0 | 104 | 92 | 0 | 564 |
| [symbol] SACC [symbol] - [symbol] | | | | | 330 | | | 0 | 0 | 823 | 6104 | 0 | 129 | 0 | 0 | 1081 |
| [symbol] - [symbol] | | | | | 329 | | | [symbol] | 0 | [symbol] 031 | 2 [symbol] | 43113 | 442 | [symbol] | 147 | 7317 |
| HT [symbol] - [symbol] | | | | | 327 | | | [symbol] | 0 | 272 | 2277 | 0 | 0 | 114 | 148 | 2 [symbol] 2 |
| [symbol] , [symbol] | | | | | 326 | | | 2058 | 25 | 417 | 11256 | 201 [symbol] | 125 | 871 | 0 | [symbol] |
| HT [symbol] - [symbol] | | | | | 321 | | | 9 | 20 | 0 | 2 [symbol] 34 | 0 | 0 | 24 [symbol] | 0 | 2382 |
| [symbol] 3rd [symbol] | | | | | 320 | | | 253 | 0 | [symbol] | [symbol] 611 | 77802 | 1049 | 307 | 294 | 1 [symbol] 0 |
| [symbol] - [symbol] | | | | | 319 | | | 447 | 3490 | 5764 | 177 [symbol] | 110677 | 52 [symbol] | 9031 | 12 [symbol] | 132 [symbol] 1 |
| [symbol] - [symbol] | | | | | 315 | | | 227 | 290 | 29285 | [symbol] 9 | 19054 | 2424 | [symbol] 3 | 79 | 9214 |
| [symbol] - [symbol] | | | | | 314 | | | 230 | 470 | 20 [symbol] | 12 [symbol] | 4 [symbol] 2 | 1 [symbol] 3 | 1002 | 273 | 14207 |
| [symbol] - [symbol] | | | | | 311 | | | 90 | 52 | 42 | 73 [symbol] | 314 | 173 | 9 | 162 | 1713 |
| [symbol] - [symbol] | | | | | 309 | | | 0 | 21 | 308 | 2 [symbol] 37 | 0 | 145 | 49 | 0 | 1645 |
| [symbol] gland | | | | | 307 | | | 24 [symbol] | 0 | 225 | 54 [symbol] | 19 | 169 | 57 [symbol] | 190 | 144 [symbol] |
| [symbol] - [symbol] | | | | | 304 | | | 0 | 11 | 194 | 4771 | 847 | [symbol] 36 | 19 | 0 | 2 [symbol] 9 |
| [symbol] gland | | | | | 303 | | | 146 | 734 | 3409 | 7475 | 735 | 1902 | 150 | 34 | 9057 |
| [symbol] - [symbol] | | | | | [symbol] | | | 0 | [symbol] | 27084 | 14441 | 141733 | 106 | 400 | 10 | 3863 |
| [symbol] - [symbol] | | | | | 296 | | | [symbol] | 1134 | 7043 | [symbol] | 9706 | 3876 | 2877 | [symbol] | 19783 |
| [symbol] - [symbol] | | | | | [symbol] | | | [symbol] | 344 | 14347 | [symbol] | 12364 | 1179 | 1089 | 384 | [symbol] |
| [symbol] - [symbol] | | | | | 296 | | | 0 | 344 | 702 | [symbol] | [symbol] | 2347 | 132 | 153 | 7683 |
| [symbol] - [symbol] | | | | | 294 | | | 485 | [symbol] | 546 | 4105 | 13000 | 4373 | [symbol] | 311 | 11648 |
| [symbol] - [symbol] | | | | | 292 | | | 136 | 84 | 1830 | 4123 | 279 | 479 | 231 | 134 | 5612 |
| [symbol] - [symbol] | | | | | 230 | | | 833 | 1439 | 38493 | 18470 | 4733 | 3133 | 1374 | 124 | 15783 |
| homo [symbol] - [symbol] | | | | | 279 | | | 0 | 0 | 0 | 1113 | 0 | 15 | 0 | 143 | 1019 |
| [symbol] - [symbol] | | | | | 277 | | | 0 | 0 | 442 | [symbol] | 143 | 29 | 0 | 0 | 2444 |
| Hpaec | | | | | 278 | 273 | | 110 | 124 | 87 | 2787 | 172 | 0 | 0 | 73 | 1917 |
| Ht [symbol] | | | | | 294 | | | 0 | 0 | 0 | 1285 | 0 | 113 | 82 | 109 | [symbol] |
| Ht [symbol] | | | | | 266 | | | 0 | 0 | 0 | 0909 | 0 | 0 | 13 | 0 | 7422 |
| [symbol] -11 | | | | | 239 | 336 | | 0 | 1002 | 0 | 8324 | 587 | 10 | 11 | 31 | 1434 |
| [symbol] - [symbol] | | | | | 238 | [symbol] | | 527 | 98 | 213 | 4743 | 1703 | 313 | 11 | 130 | 8438 |
| HT372- [symbol] | | | | | 234 | | | 158 | 0 | 0 | 4079 | 2761 | 734 | 0 | 52 | 2234 |
| [symbol] -7 | | | | | 233 | 233 | | 192 | 112 | 0 | 2948 | 0 | 134 | 64 | 0 | 8712 |
| [symbol] -6 | | | | | 231 | 231 | | 0 | 0 | 184 | [symbol] | 0 | 50 | 82 | 0 | [symbol] |
| [symbol] -2 | | | | | 239 | 279 | | 0 | 0 | 347 | 3473 | 0 | 50 | 50 | 171 | [symbol] |
| [symbol] -1 | | | | | 227 | 227 | | 308 | 52 | 0 | 1773 | 205 | 10 | 0 | 32 | 9127 |
| [symbol] - [symbol] | | | | | 322 | | | 41 | 0 | 1051 | 3212 | 0 | 183 | 133 | 40 | 2036 |
| [symbol] - [symbol] | | | | | 216 | | | 200 | 0 | 0 | 7296 | 876 | 0 | 131 | 0 | 1579 |
| [symbol] - [symbol] | | | | | 214 | | | 0 | 204 | 0 | 8474 | 0 | 1257 | 315 | 108 | 2857 |
| [symbol] - [symbol] | | | | | 213 | | | 35 | 8 | 0 | [symbol] 1 | 0 | 123 | 0 | 0 | [symbol] |
| [symbol] - [symbol] | | | | | 212 | | | 0 | 93 | 243 | [symbol] | 196 | [symbol] | 113 | 75 | 3834 |
| HCAEC | | | | | 211 | 211 | | 0 | 0 | 0 | 3921 | 1 | 190 | 0 | 28 | 1167 |
| [symbol] - [symbol] | | | | | 210 | | | 186 | 143 | 0 | 4763 | 0 | 873 | 109 | 182 | 1473 |
| [symbol] | | | | | 209 | | | 115 | 0 | 54 | 2295 | 0 | 1 [symbol] | 0 | 70 | 2718 |
| [symbol] - [symbol] | | | | | 205 | | | 236 | 50 | 125 | 2870 | 0 | 1785 | 72 | 15 | 2 [symbol] |
| [symbol] - [symbol] | | | | | 203 | | | 124 | 15 | 329 | 3074 | 183 | 53 | 38 | 0 | 831 |
| [symbol] - [symbol] | | | | | 201 | | | 0 | 0 | 194 | 27 [symbol] | 0 | 83 | 101 | 7 | 2100 |
| [symbol] - [symbol] | | | | | 1 [symbol] | | | 1 [symbol] | 35 | 0 | 3811 | 0 | 154 | 63 | 0 | 1438 |
| [symbol] - [symbol] | | | | | 197 | | | 33 | 49 | 2102 | 2 [symbol] | 125 [symbol] | 183 | 113 | 0 | [symbol] |
| HEPM 34 TOPS1 [symbol] | | | | | [symbol] | | | 444 | 135 | 213 | 1914 | 0 | 364 | 0 | 70 | 3531 |
| [symbol] - [symbol] | | | | | 183 | | | 0 | 444 | 135 | 213 | 0 | 349 | 71 | 0 | 712 |
| [symbol] - [symbol] | | | | | 81 | | | 0 | 87 | 0 | 1834 | 0 | 0 | 172 | 0 | 1302 |
| [symbol] - [symbol] | | | | | 86 | | | 409 | 3 [symbol] | 447 | 1283 | 0 | 1374 | 867 | 31 | 13412 |
| [symbol] - [symbol] | | | | | 87 | | | 0 | 213 | 181 | 1330 | 0 | 977 | 476 | 112 | [symbol] |
| [symbol] - [symbol] | | | | | [symbol] | | | 155 | 184 | 3427 | 2343 | 0 | [symbol] | 281 | [symbol] | 4283 |
| [symbol] - [symbol] | | | | | [symbol] 3 | | | 149 | 113 | 105 | 34 | 0 | 0 | 0 | 21 | 834 |
| [symbol] - [symbol] | | | | | 81 | | | 0 | 83 | 204 | 1747 | 18 | 382 | [symbol] | 0 | 2902 |
| [symbol] - [symbol] | | | | | 49 | | | 0 | 78 | 290 | 5454 | 1233 | 275 | 218 | 0 | 1413 |
| HELA- [symbol] -031 [symbol] | | | | 79 | | | | 213 | 587 | 121 | 3227 | 805 | 81 | 190 | 0 | 8484 |
| HELA- [symbol] -031 [symbol] | | | | 81 | | | | 72 | 174 | 0 | 3329 | 0 | 0 | [symbol] | 0 | 5479 |
| HELA- [symbol] -031 [symbol] | | | | 83 | | | | 0 | 253 | 215 | 2 [symbol] | 204 | 0 | 315 | 0 | [symbol] |
| HELA- [symbol] -031 [symbol] | | | | 84 | | | | 83 | 0 | 257 | 2475 | 0 | 0 | 296 | 0 | [symbol] 47 |
| HELA- [symbol] -031 [symbol] | | | | [symbol] | | | | 140 | 340 | 0 | 9084 | 37 [symbol] | 0 | 247 | 0 | 4351 |
| HELA- [symbol] -031 [symbol] | | | | [symbol] | | | | 342 | 203 | 0 | 6775 | 0 | 94 | 0 | 183 | 7038 |
| HELA- [symbol] -031 [symbol] | | | | 82 | | | | 33 | 813 | 616 | 8034 | 0 | 184 | 0 | 0 | 7091 |
| HELA- [symbol] -031 [symbol] | | | | [symbol] | | | | 134 | 143 | 234 | 4109 | 0 | 0 | 0 | 0 | 3438 |
| HELA- [symbol] -031 [symbol] | | | | [symbol] | | | | 43 | 0 | 384 | 1916 | 0 | 103 | 47 | 0 | 3000 |
| H [symbol] | | | | 146 | | | | 0 | 18 | 8702 | 747 | 1508 | 1734 | 34 | 0 | 1485 |
| H [symbol] | | | | 148 | | | | 0 | 74 | 9 [symbol] | 1557 | 241 | 11 | 0 | 34 | 2372 |
| SA [symbol] 19 | | | | 150 | | | | 0 | 74 | 9783 | 1557 | 241 | 71 | 0 | 34 | 2372 |
| [symbol] | | | | 152 | | | | 0 | 138 | [symbol] | [symbol] 30 | 4181 | 818 | 0 | 0 | 3485 |
| [symbol] | | | | 154 | | | | 91 | 109 | 34338 | [symbol] | 300 | 1174 | [symbol] | 194 | 8211 |
| SF [symbol] | | | | 154 | | | | 242 | 0 | 3482 | 0 | [symbol] | 37 | 102 | 0 | 1189 |
| SF- [symbol] | | | | 154 | | | | 52 | 0 | 1743 | 201 | 0 | 87 | 3 | 27 | 937 |
| CCRF-CEM | | | | 150 | | | | 0 | 0 | [symbol] 83 | 443 | 3 | 247 | 0 | 121 | 1419 |
| DY- [symbol] | | | | 152 | | | | [symbol] | 0 | 1041 | 173 | 6033 | 184 | 302 | 87 | [symbol] |
| HCT 116 | | | | 184 | | | | 0 | 20 | 1437 | 817 | 372 | 0 | 0 | 1437 | 791 |
| [symbol] 1 | | | | [symbol] | | | | 279 | 236 | [symbol] 781 | 1322 | 0 | 782 | 0 | 0 | [symbol] |
| T [symbol] | | | | [symbol] | | | | [symbol] | [symbol] | [symbol] | 4542 | 3083 | 4163 | 138 | 0 | 3600 |
| T470 | | | | [symbol] | | | | 0 | 236 | 13838 | 3870 | [symbol] | 2368 | 454 | 0 | 1 [symbol] |
| [symbol] | | | | 171 | | | | 43 | 0 | 0 | 1622 | [symbol] | 0 | 61 | 0 | 2573 |
| [symbol] 1441 [symbol] | | | | 181 | | | | 0 | 264 | 0 | 0 | 1781 | 0 | 1 | 128 | 543 |
| [symbol] | | | | 183 | | | | 28 | 0 | 0 | 321 | 111 | 0 | 0 | 0 | 384 |
| [symbol] | | | | 184 | | | | 114 | 0 | 141 | 2325 | 0 | 0 | 136 | 0 | 3700 |
| [symbol] | | | | 194 | | | | 218 | 0 | 1383 | 3226 | 0 | 0 | 101 | 130 | 3434 |
| [symbol] | | | | 198 | | | | 0 | 172 | 10072 | 1171 | [symbol] | 147 | 130 | 83 | 1431 |
| [symbol] | | | | 200 | | | | [symbol] | 0 | 3877 | 0 | 2173 | 364 | 0 | 183 | 4827 |
| [symbol] | | | | 202 | | | | 100 | 0 | [symbol] | 402 | 215 | 140 | 0 | 0 | 3477 |
| [symbol] | | | | 204 | | | | 112 | 0 | 0 | 300 | 0 | 79 | 252 | 134 | 438 |
| [symbol] | | | | 20 [symbol] | | | | 0 | 300 | 813 | 237 | 216 | 0 | 0 | 0 | 1376 |
| [symbol] | | | | 20 [symbol] | | | | 1140 | 0 | 2134 | 2643 | 526 | 800 | 0 | 197 | 8071 |
| [symbol] | | | | 216 | | | | 0 | 0 | 382 | 1884 | 0 | 25 | 143 | 8 | 3126 |
| [symbol] | | | | 219 | | | | 0 | 0 | 901 | 3083 | 414 | 626 | 184 | 0 | 3255 |
| C [symbol] 1441- [symbol] | | | | 220 | | | | 0 | 154 | 0 | 177 | 0 | 0 | 8 | 71 | 1173 |
| [symbol] -1 | | | | 221 | | | | 18 | [symbol] | 0 | 2117 | 0 | 0 | [symbol] 1 | 84 | 2344 |
| [symbol] -2 | | | | 223 | | | | [symbol] | 0 | 45 | 1182 | 104 | 0 | 133 | 0 | 2280 |
| [symbol] -4 | | | | 225 | | | | 0 | 230 | 0 | 622 | 0 | 0 | 34 | 0 | 1273 |
| [symbol] | | | | 241 | | | | 0 | 0 | 1700 | 1800 | 183 | 136 | 216 | 0 | 2325 |
| HCL T-4 | | | | 242 | | | | [symbol] | 143 | [symbol] 63 | 1036 | 3006 | 183 | 160 | 10 | 1276 |
| [symbol] | | | | 243 | | | | 0 | 0 | 32076 | 1884 | [symbol] | 311 | 300 | 0 | [symbol] |
| [symbol] | | | | 244 | | | | 0 | 228 | 14080 | 2061 | 0 | 64 | 215 | 0 | 4264 |
| [symbol] | | | | 245 | | | | 0 | 1087 | 77132 | 1403 | 0 | 700 | 225 | 1 | 3648 |
| [symbol] 1226 | | | | 246 | | | | 0 | 0 | 0 | 011 | 838 | 57 | 0 | 7 | 34 |
| [symbol] TCC | | | | 247 | | | | 0 | 0 | 4447 | 255 | 0 | 168 | 98 | 0 | 2344 |
| SR | | | | 248 | | | | 0 | 183 | 18413 | 954 | 1882 | 638 | 17 | 0 | 2103 |
| DVC- [symbol] | | | | 249 | | | | 0 | 144 | 8806 | 1324 | 168 | 0 | 80 | 218 | 4234 |
| HCT-15 | | | | 250 | | | | 129 | 0 | 45225 | 1488 | 201 | 500 | 0 | 95 | 8063 |
| [symbol] -4 | | | | 251 | | | | 171 | 0 | 2381 | 54 | 0 | 180 | 0 | 187 | 98323 |
| UC-31 | | | | 252 | | | | 208 | 0 | 307 | 460 | 0 | 38 | 0 | 131 | 1431 |
| DVC-AR-6 | | | | 253 | | | | 0 | 10 | 577 | 3408 | 0 | 1477 | 0 | 0 | 4318 |
| [symbol] | | | | 254 | | | | 486 | 0 | 6634 | 173 | 0 | 0 | 322 | 1821 | 4185 |
| DVC-AR- [symbol] | | | | 255 | | | | 181 | 94 | 17088 | 486 | 0 | 54 | 128 | 0 | 1781 |
| [symbol] | | | | 256 | | | | 0 | 2036 | 82875 | 1863 | 1303 | 1383 | 0 | 134 | 5348 |
| [symbol] | | | | 257 | | | | 140 | 0 | 32874 | 1309 | 176 | 178 | 0 | 326 | 4434 |
| [symbol] -2 | | | | 258 | | | | 0 | 187 | 4482 | 224 | 0 | 0 | 48 | 547 | 1206 |
| SLOV-3 | | | | 259 | | | | 0 | 13 | 4761 | 313 | 681 | 681 | 0 | 71 | 1009 |
| SX-VCL-4 | | | | 260 | | | | 0 | 101 | 3676 | 172 | 38 | 29 | 0 | 41 | 1811 |
| [symbol] | | | | 261 | | | | [symbol] | 0 | 73832 | 1603 | 821 | 927 | 456 | 174 | 4154 |
| [symbol] | | | | 262 | | | | 187 | 0 | 14342 | 144 | 0 | 0 | 34 | 0 | 1278 |
| X-342 | | | | 263 | | | | 0 | 118 | 36631 | 926 | 1876 | 432 | 74 | 63 | 2880 |
| LACC-257 | | | | 264 | | | | 0 | 83 | 8654 | 1800 | 175 | 81 | 108 | 6 | 1257 |
| M14 | | | | 265 | | | | 0 | 21 | 1254 | 873 | 3737 | 0 | 121 | 0 | 2308 |
| MCF7 | | | | 267 | | | | 128 | 258 | 23780 | 6300 | 1000 | 0 | 215 | 0 | 14382 |
| MDA- [symbol] -425 | | | | 268 | | | | 0 | 0 | 8781 | 383 | 0 | 147 | 250 | 136 | 4085 |
| MT276 | | | | 270 | | | | 30 | 36 | 0 | 1064 | 0 | 67 | 170 | 25 | 3872 |
| MDA-N | | | | 271 | | | | 0 | 0 | 14736 | 415 | 0 | 441 | 336 | 0 | 4136 |
| [symbol] | | | | 273 | | | | 11 | 341 | 8084 | 4474 | 0 | 1320 | 0 | 345 | 12179 |
| [symbol] | | | | 280 | | | | 25 | 360 | 15640 | 6370 | 1854 | 2113 | 1061 | 0 | 11610 |
| WT838 [symbol] TPA [symbol] 823 | | | | 300 | | | | 71 | 0 | 0 | 8304 | 0 | 0 | 40 | 483 | 786 |
| HELA-EXP- [symbol] | | | | 313 | | | | 37 | 42 | 0 | 4774 | 0 | 0 | 185 | 97 | 3084 |
| [symbol] | | | | 322 | | | | 344 | 0 | 616 | 6852 | 16719 | 0 | 800 | 0 | 4427 |
| HT347 | | | | 323 | | | | [symbol] | 0 | 50 | 4108 | 170 | 377 | 142 | 83 | 8447 |
| [symbol] | | | | 324 | | | | 942 | 94 | 0 | 8137 | 8287 | 481 | 385 | 170 | 1663 |
| MCL-H [symbol] | | | | 336 | | | | [symbol] | 31 | 11483 | 1317 | 1815 | 8 | 171 | 0 | 0 |
| HOP-42 | | | | 337 | | | | 0 | 0 | 10827 | 3205 | 0 | 226 | 138 | 0 | 3071 |
| MOA-MB-231 | | | | 338 | | | | [symbol] | 1127 | 138008 | 18086 | 38722 | 8586 | 1087 | 45 | 13418 |
| U251 | | | | 339 | | | | [symbol] | 1786 | 720047 | 9036 | 80293 | 30873 | 1374 | 0 | 19432 |
| PT [symbol] | | | | 340 | | | | 0 | 112 | 8025 | 778 | 0 | 446 | 136 | 37 | 2086 |
| PC-3 | | | | 341 | | | | 673 | 215 | 29876 | 7064 | 78117 | 1417 | 1087 | 0 | 9562 |
| HCC-2000 | | | | 343 | | | | 0 | 3 | 7508 | 1213 | 708 | 179 | 829 | 0 | 3085 |
| [symbol] | | | | 345 | | | | 80 | 6 | 32834 | 1180 | 5491 | 27 | 343 | 0 | 5447 |
| HT182 | | | | 346 | | | | 48 | 0 | 1998 | 1007 | 0 | 13 | 381 | 0 | 3808 |
| COLO 20 [symbol] | | | | 347 | | | | 17 | 96 | 3856 | 946 | 834 | 0 | 481 | 0 | 940 |
| HT316 | | | | 348 | | | | 1 | 0 | 512 | 6443 | 0 | 72 | 0 | 0 | 2341 |
| MO4-12 | | | | 349 | | | | 0 | 81 | 9886 | 3008 | 913 | 0 | 188 | 0 | 1130 |
| HT151 | | | | 350 | | | | 32 | 302 | 252 | 7132 | 0 | 782 | 306 | 22 | 4497 |
| A438 | | | | 351 | | | | 137 | 11 | 8123 | 3278 | 2335 | 0 | 308 | 0 | 2252 |
| HT383 | | | | 352 | | | | 235 | 131 | 0 | 14919 | 186 | 0 | 183 | 0 | 1887 |
| PGG [symbol] | | | | 353 | | | | 350 | 0 | 8021 | 2130 | 3003 | 112 | 219 | 0 | 1887 |
| T [symbol] | | | | 355 | | | | 2370 | 1831 | 58083 | 4438 | 38183 | 4039 | 184 | 173 | 6282 |
| [symbol] | | | | 357 | | | | 1422 | 1373 | 942135 | 14400 | 51277 | 9086 | 947 | 84 | 6236 |
| MS 8787 | | | | 358 | | | | 184 | 48 | 21180 | 1286 | 1187 | 1033 | 180 | 12 | 628 |
| HT313 | | | 50 | | | | | 0 | 0 | 707 | 2163 | 0 | 600 | 338 | 0 | 14318 |
| HT344 | | | 52 | | | | | 144 | 0 | 947 | 3338 | 0 | 98 | 160 | 0 | 18288 |
| HT130 | | | 53 | | | | | 174 | 0 | 0 | 3229 | 0 | 84 | 307 | 27 | 9584 |
| HT156 | | | 54 | | | | | 0 | 0 | 13 | 2383 | 0 | 0 | 80 | 0 | 18006 |
| HT163 | | | 58 | | | | | 376 | 0 | 118 | 1859 | 0 | 412 | 181 | 117 | 9434 |
| HT170 | | | 60 | | | | | 713 | 0 | 2417 | 9484 | 1368 | 0 | 710 | 0 | 13123 |
| HT172 | | | 62 | | | | | 111 | 0 | 95 | 2328 | 0 | 0 | 29 | 0 | [symbol] |
| HT178 | | | 63 | | | | | 384 | 34 | 83 | 3079 | 0 | 0 | 0 | 0 | 8428 |
| HT179 | | | 64 | | | | | 0 | 78 | 147 | 3414 | 0 | 821 | 40 | 0 | 6827 |
| HT184 | | | 65 | | | | | [symbol] | 0 | 374 | 2820 | 0 | 0 | 907 | 0 | 12319 |
| HT180 | | | 66 | | | | | 43 | 122 | 4371 | 3000 | 0 | 0 | 0 | 48 | 3831 |
| HT188 | | | 67 | | | | | 0 | 118 | 0 | 1861 | 0 | 0 | 340 | 182 | 2359 |
| HT190 | | | 68 | | | | | 43 | 638 | 2823 | 3580 | 0 | 984 | 83 | 78 | 8023 |
| HT143 | | | 69 | | | | | 327 | 0 | 0 | 2961 | 0 | 0 | 182 | 0 | 432 |
| HT1 [symbol] 0 | | | 70 | | | | | 382 | 71 | 1386 | 8686 | 0 | 209 | 388 | 0 | 1551 |
| HT144 | | | 71 | | | | | 84 | 88 | 2044 | 4734 | 0 | 0 | 230 | 0 | 428 |
| HT227 | | | 72 | | | | | 12 | 0 | 215 | 3473 | 0 | 1015 | 484 | 0 | 2054 |
| HT302 | | | 73 | | | | | 143 | 0 | 2818 | 7388 | 1860 | 4134 | 721 | 174 | 25415 |
| HT314 | | | 74 | | | | | 230 | 0 | 674 | 6547 | 0 | 838 | 340 | 0 | 15481 |
| HT317 | | | 76 | | | | | 285 | 0 | 348 | 7398 | 705 | 978 | 585 | 235 | 15104 |
| [symbol] | | | 77 | | | | | 0 | 0 | 0 | [symbol] | 2 | 0 | 52 | 0 | 87 |
| HT323 | | | 79 | | | | | 0 | 0 | [symbol] | [symbol] | 0 | [symbol] | [symbol] | 0 | 9443 |
| HT327 | | | 80 | | | | | 0 | 83 | 230 | [symbol] | 1133 | 0 | [symbol] | [symbol] | [symbol] |
| HT336 | | | 82 | | | | | 0 | 0 | 0 | [symbol] | 0 | [symbol] | 0 | 0 | [symbol] |
| HT1 [symbol] | | | 83 | | | | | 4 [symbol] | 5 | 93 | 0 | 0 | [symbol] | 0 | 132 | 1344 |
| HT3 [symbol] | | | 87 | | | | | [symbol] | 15 [symbol] | 1 [symbol] 0 | 1429 | 0 | 1017 | 0 | 0 | 3434 |
| HT311 | | | 170 | | | | | 23 [symbol] | 0 | 0 | 317 [symbol] | 0 | 130 | [symbol] | 117 | [symbol] |
| HT [symbol] | | | 185 | | | | | [symbol] 73 | 0 | 0 | 11 [symbol] | 1414 | 0 | [symbol] | 0 | [symbol] |
| HT1 [symbol] | | | 187 | | | | | 230 | 117 | 0 | 0 | 0 | 0 | 1 [symbol] | 1 [symbol] | 144 |
| HT [symbol] | | | 189 | | | | | 303 | 0 | 0 | 1304 | [symbol] | 0 | 3 [symbol] 1 | 0 | 4 [symbol] |
| HT372 | | | 191 | | | | | 43 | 220 | 0 | 2713 | 0 | 2 [symbol] | 1 [symbol] | 144 | 43 [symbol] |
| TCOP | | | 207 | | | | | [symbol] 4 | 17 | 0 | 14 [symbol] 0 | 0 | 0 | 10 | 0 | 3112 |
| HT1 [symbol] 0 | | | 215 | | | | | 0 | 0 | [symbol] 0 | 13 [symbol] | 304 | 0 | 40 | 0 | 1331 |
| HT [symbol] 07 | | | 217 | | | | | 0 | [symbol] 0 | 0 | 3222 | 0 | 44 | 14 [symbol] | 0 | 41 [symbol] |
| HT3 [symbol] 4 | | | 224 | | | | | 343 | 0 | 0 | [symbol] | 13719 | 127 | 327 | 11 [symbol] | 4916 |
| HT370 | | | 225 | | | | | 114 | 0 | 0 | 1343 | 0 | 0 | 0 | 0 | [symbol] |
| HT371 | | | 228 | | | | | 170 | [symbol] | 32 | [symbol] 71 | 0 | 0 | 12 [symbol] | 0 | [symbol] 22 |
| HT377 | | | 230 | | | | | 30 | 181 | 122 | [symbol] | [symbol] 7 | 135 | [symbol] 3 | 0 | [symbol] |
| HT [symbol] | | | 234 | | | | | 1 [symbol] | [symbol] 1 | 0 | 4305 | 142 | 820 | [symbol] | 132 | [symbol] |
| [symbol] | | | 2 [symbol] 1 | | | | | 0 | 0 | 103 | [symbol] | 0 | 30 | 41 | 0 | 283 |
| HT334 | | | [symbol] | | | | | 0 | 127 | 0 | 8791 | 1302 | [symbol] | 123 | 0 | [symbol] |
| HT334 | | | 301 | | | | | [symbol] | 52 | 0 | 2712 | 0 | 185 | 341 | 279 | [symbol] |
| HT [symbol] | | | 315 | | | | | 1 [symbol] 4 | 0 | 22 [symbol] | 322 | [symbol] | 107 | 31 | 308 | 3177 |
| HT [symbol] | | | 317 | | | | | 83 | 2474 | 0 | [symbol] | 0 | [symbol] 01 | [symbol] | 0 | 77 [symbol] |
| HT312 | | | 318 | | | | | 309 | [symbol] | 1 [symbol] 4 | [symbol] | 0 | 17 | [symbol] | 180 | [symbol] 743 |
| HT182 | | | 325 | | | | | 415 | 0 | 22 [symbol] | 2191 | 0 | 0 | 0 | 0 | 20 |
| HT [symbol] | | | 354 | | | | | [symbol] | 100 | 0 | 3119 | 0 | 0 | 0 | 0 | 2471 |
| HT1 [symbol] 7 | | | 3 [symbol] 0 | | | | | 4 [symbol] | 0 | 0 | 4418 | [symbol] | [symbol] | [symbol] | 0 | 145 |
| T-470 | 143 | | | | | | | 437 | 128 | 35100 | [symbol] | 174 [symbol] 70 | 3414 | 112 | 0 | [symbol] |
| [symbol] | [symbol] | | | | | | | 485 | 135 | [symbol] 0419 | [symbol] 015 | 157 [symbol] | 1441 | 123 | 114 | 4 [symbol] 1 |
| MO [symbol] - [symbol] -435 | 154 | | | | | | | 79 | 0 | 142 [symbol] 4 | 404 [symbol] | [symbol] | 2831 | 197 | 0 | [symbol] |
| MO [symbol] - [symbol] -231 | 157 | | | | | | | [symbol] 15 | 282 | [symbol] | [symbol] | [symbol] | 7911 | 328 | 441 | 4471 |
| [symbol] | 153 | | | | | | | 235 | 125 | 122345 | 4402 | 291883 | 3072 | 334 | 43 | 9383 |
| MCF- [symbol] | 152 | | | | | | | 464 | 0 | 82988 | 3783 | 172347 | 408 | 234 | 71 | 4902 |
| MCF7 | 151 | | | | | | | 0 | 90 | 23491 | 3643 | 218251 | 402 | 407 | 54 | 6604 |
| M14 | 149 | | | | | | | 34 | 0 | [symbol] | 5725 | 99836 | 734 | 734 | 78 | [symbol] |
| UACC-2 [symbol] | 148 | | | | | | | 0 | 130 | [symbol] | 4088 | 49506 | 1177 | 1177 | 77 | 3942 |
| UACC- [symbol] | 147 | | | | | | | 9 | 33 | [symbol] | 8515 | 47918 | 123 | 1123 | 0 | [symbol] |
| [symbol] | 146 | | | | | | | 0 | 133 | [symbol] | 6315 | 14330 | 128 | 127 | 24 | [symbol] |
| VO-31 | 145 | | | | | | | 304 | 100 | 36141 | 6315 | 73374 | 120 | 120 | 27 | 4746 |
| [symbol] | 144 | | | | | | | 105 | 0 | 20849 | 9249 | 73371 | 1853 | 1055 | 11 | 2380 |
| [symbol] | 143 | | | | | | | 416 | 0 | 28587 | 2364 | 80993 | 198 | 190 | 182 | 2792 |
| [symbol] | 142 | | | | | | | 171 | 0 | 3464 | 2306 | 130029 | 27 | 27 | 132 | 7404 |
| HCT-13 | 141 | | | | | | | 0 | 47 | 22819 | 3813 | 194839 | 100 | 100 | 163 | 3750 |
| [symbol] | 140 | | | | | | | 140 | 130 | 12009 | 5785 | 137883 | 877 | 877 | 0 | 8273 |
| COLO [symbol] | 139 | | | | | | | 0 | 213 | 23499 | 5643 | 114681 | 942 | 942 | 74 | 4536 |
| Lax [symbol] | 138 | | | | | | | 158 | 1464 | 21811 | 3350 | 112345 | 1470 | 1476 | 0 | 7443 |
| [symbol] | 137 | | | | | | | 188 | 0 | 90087 | 3417 | 164917 | 796 | 796 | 210 | 9336 |
| TK- [symbol] | 136 | | | | | | | 0 | 137 | 11994 | 4148 | 19124 | 1900 | 1183 | 0 | [symbol] |
| HCT 11 [symbol] | 135 | | | | | | | 1080 | 90 | [symbol] | 2016 | 118724 | 162 | 182 | 283 | [symbol] |
| [symbol] | 134 | | | | | | | 225 | 0 | 7185 | 3038 | 103477 | 1314 | 3314 | 42 | 2382 |
| HCC- [symbol] | 132 | | | | | | | 0 | 180 | 28315 | 4509 | 127191 | 485 | 495 | 0 | 1400 |
| ACM | 131 | | | | | | | 0 | 130 | 17047 | 4256 | 97808 | 473 | 473 | 144 | 1600 |
| PC-3 | 130 | | | | | | | 100 | 104 | 28733 | 2713 | 90476 | 1017 | 1017 | 0 | 3677 |
| [symbol] | 129 | | | | | | | 134 | 204 | 8373 | 2502 | 98863 | 377 | 377 | 85 | 1233 |
| DU-145 | 128 | | | | | | | 0 | 70 | 34000 | 2431 | 17433 | 256 | 1258 | 0 | 10013 |
| C [symbol] | 127 | | | | | | | 0 | 141 | 8334 | 2645 | 64342 | 3136 | 3136 | 0 | 4275 |
| SR | 126 | | | | | | | 0 | 79 | 60187 | 2501 | 34429 | 1649 | 1619 | 47 | [symbol] |
| A [symbol] | 125 | | | | | | | 0 | 153 | 8483 | 2800 | 31346 | 19 | 15 | 9 | 10134 |
| RPM [symbol] | 124 | | | | | | | 34 | 0 | 28456 | 2614 | 12834 | 102 | 102 | 163 | 24438 |
| SN12C | 123 | | | | | | | 0 | 0 | 80 | 7382 | 38811 | 142 | 142306 | 43 | 3934 |
| [symbol] | 122 | | | | | | | 813 | 100 | 34753 | 8301 | 489 | 365 | 1346 | 173 | 9433 |
| MOLT-4 | 121 | | | | | | | 0 | 0 | 825 | 5372 | 83742 | 1349 | 4613 | 0 | 8579 |
| OVCAR-5 | 120 | | | | | | | 425 | 0 | 908 | 4872 | 41219 | 4613 | 2277 | 171 | 3791 |
| X- [symbol] | 119 | | | | | | | 254 | 0 | 820 | 4997 | 198477 | 2277 | 8057 | 70 | 6240 |
| OVCAR-4 | 118 | | | | | | | 854 | 246 | 10918 | 2514 | 133148 | 4057 | 9077 | 9 | 3661 |
| CCAF-CON | 117 | | | | | | | 0 | 0 | 21540 | 3482 | 113796 | 9077 | 1905 | 9 | 6605 |
| OVCAR-3 | 116 | | | | | | | 464 | 37 | 14296 | 2885 | 98833 | 1921 | 2383 | 0 | 5443 |
| [symbol] | 115 | | | | | | | 217 | 0 | 13067 | 1330 | 95279 | 2383 | 2098 | 0 | 13804 |
| MOP-42 | 114 | | | | | | | 404 | 153 | 14168 | 3873 | 72198 | 2088 | 3313 | 0 | 8445 |
| SF-285 | 113 | | | | | | | 201 | 0 | 34834 | 4034 | 89199 | 3313 | 3808 | 6 | 4124 |
| [symbol] TCC | 112 | | | | | | | 1006 | 321 | 21130 | 2917 | 128199 | 3808 | 990 | 0 | 7211 |
| SF-295 | 111 | | | | | | | 0 | 0 | 44884 | 7405 | 134794 | 990 | 3557 | 416 | 4202 |
| NCA- [symbol] | 110 | | | | | | | 264 | 213 | 23877 | 1108 | 81138 | 3557 | 1164 | 113 | 6291 |
| SNS-75 | 109 | | | | | | | 232 | 0 | 33099 | 2890 | 1448017 | 1164 | 3814 | 253 | 1418 |
| MC [symbol] | 108 | | | | | | | 178 | 216 | 24583 | 1042 | 40575 | 3414 | 1006 | 5 | 4176 |
| SNB-19 | 107 | | | | | | | 0 | 335 | 27031 | 4126 | 69012 | 1006 | 1194 | 0 | 10000 |
| MCA-224 | 106 | | | | | | | 212 | 0 | 8081 | 2982 | 72818 | 1194 | 1803 | 0 | 5661 |
| SK-OV-3 | 105 | | | | | | | 138 | 14 | 23147 | 5630 | 17279 | 1103 | 4093 | 87 | 9011 |
| NCH-33 | 104 | | | | | | | 211 | 119 | 8406 | 2381 | 11321 | 4083 | 1944 | 298 | 12724 |
| [symbol] | 103 | | | | | | | 0 | 0 | 2151 | 2994 | 18030 | 9544 | 1016 | 171 | 8783 |
| BCVX | 102 | | | | | | | 319 | 432 | 8434 | 2107 | 2371 | 1016 | 1772 | 54 | 9100 |
| OVCAR-4 | 101 | | | | | | | 0 | 242 | 61716 | 4544 | 18131 | 1772 | 613 | 2151 | 12000 |
| MOP-42 | 100 | | | | | | | 62 | 122 | 6156 | 8395 | 5728 | 913 | 7072 | 0 | 4886 |
| [symbol] | 48 | | | | | | | 109 | 23 | 26183 | 7181 | 2989 | 3072 | 19079 | 0 | 4283 |
| [symbol] | 47 | | | | | | | 0 | 234 | 3123 | 8754 | 380 | 19079 | 4488 | 9 | 4773 |
| [symbol] | 46 | | | | | | | 315 | 280 | 19007 | 7246 | 120641 | 4968 | 634 | 9 | 6700 |
| TCOP | 76 | | | | | | | 0 | 0 | 22446 | 1182 | 122383 | 634 | 119 | 294 | 14122 |
| ASeq-1 | | | | | | | wt | 0 | 0 | 1880 | 6235 | 188916 | 116 | 341 | 8 | 110 |
| ASeq-3 | | | | | | | wt | 0 | 16 | 13008 | 83185 | 81496 | 341 | 3042 | 9 | 966 |
| ASeq-4 | | | | | | | wt | 0 | 48 | 11008 | 48136 | 0 | 3072 | 0 | 40 | 734 |
| ASeq-5 | | | | | | | wt | 0 | 22 | 2553 | 48247 | 0 | 0 | 1843 | 276 | 1182 |
| ASeq-7 | | | | | | | wt | 0 | 82 | 0 | 72997 | 0 | 1843 | 2142 | 243 | 9377 |
| EXVX-1 | | | | | | | [symbol] | 0 | 308 | 118 | 38990 | 0 | 2142 | 889 | 9 | 300 |
| EXVX-4 | | | | | | | [symbol] | 0 | 66 | 2509 | 99934 | 0 | 800 | 4794 | 9 | 1000 |
| EXVX-3 | | | | | | | [symbol] | 0 | 291 | 831 | 190881 | 0 | 4794 | 18041 | 122 | 824 |
| EXVX-6 | | | | | | | [symbol] | 0 | 225 | 2409 | 17798 | 0 | 46061 | 6764 | 129 | 3203 |
| EXVX-7 | | | | | | | [symbol] | 0 | 360 | 714 | 37831 | 0 | 6781 | 898 | 0 | 4100 |
| MCF-7-1 | | | | | | | wt | 0 | 16 | 49 | 74388 | 0 | 808 | 703 | 157 | 1196 |
| MCF-7-3 | | | | | | | wt | 0 | 1153 | 1208 | 41681 | 0 | 703 | 232 | 0 | 574 |
| MCF-7-4 | | | | | | | wt | 0 | 530 | 80 | 37949 | 0 | 332 | 0 | 0 | 891 |
| MCF-7-6 | | | | | | | wt | 0 | 234 | 0 | 32082 | 0 | 0 | 649 | 124 | 990 |
| MCF-7-7 | | | | | | | wt | 0 | 182 | 0 | 25875 | 0 | 948 | 0 | 91 | 997 |
| ADR_RES-1 | | | | | | | [symbol] | 0 | 0 | 1621 | 27895 | 0 | 199 | 2747 | 429 | 1776 |
| ADR_RES-3 | | | | | | | [symbol] | 0 | 264 | 0 | 88425 | 0 | 0 | 880 | 0 | 1127 |
| ADR_RES-4 | | | | | | | [symbol] | 0 | 144 | 20 | 46817 | 0 | 2747 | 1142 | 912 | 1423 |
| ADR_RES-5 | | | | | | | [symbol] | 0 | 811 | 1810 | 30547 | 0 | 990 | 1779 | 175 | 742 |
| ADR_RES-7 | | | | | | | [symbol] | 0 | 449 | 2457 | 27945 | 0 | 1142 | 1095 | 9 | 924 |
| WI 39-1 | | | | | | | wt | 0 | 0 | 218 | 87821 | 0 | 1779 | 11090 | 24 | 3042 |
| WI 39-3 | | | | | | | wt | 0 | 473 | 0 | 49671 | 0 | 1095 | 10250 | 0 | 1300 |
| WI 39-4 | | | | | | | wt | 0 | 453 | 4304 | 44081 | 0 | 19098 | 8330 | 110 | 1232 |
| WI 39-5 | | | | | | | wt | 0 | 382 | 3384 | 48543 | 0 | 10250 | 1404 | 0 | 1057 |
| WI 39-7 | | | | | | | wt | 0 | 0 | 1018 | 22973 | 0 | 8330 | 10729 | 0 | 1000 |
| H [symbol] -1 | | | | | | | [symbol] | 0 | 14 | 1422 | 38078 | 0 | 1404 | 857 | 0 | 1118 |
| H [symbol] -3 | | | | | | | [symbol] | 0 | 27 | 1554 | 40780 | 0 | 10729 | 764 | 189 | 847 |
| H [symbol] -4 | | | | | | | [symbol] | 0 | 247 | 385 | 41446 | 0 | 857 | 803 | 140 | 173 |
| H [symbol] -5 | | | | | | | [symbol] | 0 | 143 | 0 | 73772 | 0 | 764 | 1303 | 0 | 673 |
| H [symbol] -7 | | | | | | | [symbol] | 0 | 80 | 1254 | 40004 | 0 | 803 | 800 | 0 | 1152 |
| H1 2 [symbol] -1 | | | | | | | [symbol] | 0 | 148 | 3030 | 72779 | 0 | 1303 | 1805 | 0 | 949 |
| H1 2 [symbol] -3 | | | | | | | [symbol] | 0 | 0 | 864 | 26134 | 0 | 989 | 4889 | 181 | 441 |
| H1 2 [symbol] -4 | | | | | | | [symbol] | 0 | 687 | 149 | 36830 | 0 | 1906 | 14941 | 0 | 1922 |
| H1 2 [symbol] -5 | | | | | | | [symbol] | 0 | 1745 | 230 | 13450 | 0 | 4889 | 6836 | 0 | 1628 |
| H1 2 [symbol] -7 | | | | | | | [symbol] | 0 | 3504 | 1070 | 23000 | 0 | 14941 | 1127 | 64 | 577 |
| A [symbol] -2 | | | | | | | wt | 0 | 0 | 1823 | 34870 | 0 | 68341 | 1186 | 0 | 911 |
| BXVX-2 | | | | | | | [symbol] | 0 | 613 | 80 | 13387 | 0 | 1127 | 4336 | 115 | 1408 |
| MCT-114-1 | | | | | | | wt | 0 | 0 | 4427 | 82248 | 0 | 1186 | 1864 | 0 | 1781 |
| MCT-116-2 | | | | | | | wt | 0 | 1047 | 2782 | 122573 | 0 | 4238 | 7668 | 80 | 1283 |
| MT [symbol] -2 | | | | | | | [symbol] | 0 | [symbol] | 86 | 34958 | 0 | 1864 | 121 | 0 | 877 |
| SF [symbol] -1 | | | | | | | [symbol] | 0 | 17 | 64 | 22947 | 0 | 7886 | 2052 | 0 | 488 |
| SF [symbol] -2 | | | | | | | wt | 0 | 148 | 586 | 28348 | 0 | 121 | 4828 | 179 | 731 |
| SF [symbol] -1 | | | | | | | wt | 0 | 0 | 830 | 43018 | 0 | 2657 | 2529 | 0 | 1704 |
| SF [symbol] -2 | | | | | | | [symbol] | 0 | 182 | 21 | 48004 | 0 | 4828 | 8089 | 0 | 303 |
| OVCAR-1-1 | | | | | | | [symbol] | 0 | 0 | 3886 | 42904 | 0 | 3529 | 71791149 | 436 | 1914 |
| OVCAR-1-2 | | | | | | | wt | 0 | 239 | 1236 | 40099 | 0 | 8089 | 913 | 179 | 3434 |
| OVCAR-5-1 | | | | | | | wt | 0 | 1449 | 230 | 38089 | 0 | 7179 | 823 | 230 | 473 |
| OVCAR-5-2 | | | | | | | [symbol] | 0 | 1263 | 790 | 25744 | 0 | 1149 | 93 | 348 | 1084 |
| MCF-7-2 | | | | | | | [symbol] | 0 | 233 | 0 | 29122 | 0 | 913 | 0 | 0 | 973 |
| ADR RES-2 | | | | | | | wt | 0 | 1238 | 0 | 19243 | 0 | 923 | 144 | 63 | 1212 |
| H [symbol] -2 | | | | | | | [symbol] | 0 | 0 | 0 | 18042 | 0 | 83 | 5194 | 0 | 418 |
| SW440-1 | | | | | | | mpv E1 | 0 | 582 | 62 | 11909 | 0 | 0 | 5981 | 297 | 1302 |
| SW440-2 | | | | | | | [symbol] | 0 | 0 | 809 | 34850 | 0 | 344 | 7734 | 197 | 180 |
| H1 290-2 | | | | | | | [symbol] | 0 | 2207 | 1291 | 28070 | 0 | 5194 | 205 | 0 | 891 |
| C13A-1 | | | | | | | [symbol] | 0 | 1156 | 433 | 34405 | 0 | 5481 | 434 | 19 | 956 |
| C13A-2 | | | | | | | [symbol] | 0 | 2428 | 0 | 28147 | 0 | 7134 | 4953 | 113 | 934 |
| UPOS-1 | | | | | | | [symbol] | 0 | 817 | 0 | 60346 | 0 | 295 | 1297 | 47 | 2314 |
| UPOS-2 | | | | | | | [symbol] | 0 | 671 | 0 | 68820 | 0 | 484 | 3856 | 34 | 773 |
| Happ-1 | | | | | | | wt | 0 | 1380 | 8519 | 60213 | 0 | 4085 | 19711 | 0 | 989 |
| Happ-2 | | | | | | | wt | 0 | 275 | 1545 | 88867 | 0 | 1294 | 137 | 0 | 23036 |
| WI 38-1 | | | | | | | wt | 0 | 105 | 81 | 65770 | 0 | 856 | 13181 | 71 | 2020 |
| [symbol] -1 | | | | | | | | 0 | 134 | 241 | 23871 | 0 | 19711 | 0 | 67 | 973 |
| [symbol] -2 | | | | | | | | 0 | 2183 | 0 | 49133 | 0 | 13191 | 75 | 334 | 164 |
| [symbol] -3 | | | | | | | | 0 | 0 | 0 | 149384 | 0 | 0 | 752 | 0 | 1022 |
| [symbol] -4 | | | | | | | | 0 | 0 | 0 | 80008 | 0 | 75 | 232 | 82 | 480 |
| [symbol] -5 | | | | | | | | 0 | 0 | 0 | 1300070 | 0 | 257 | 82 | 9 | 463 |
| [symbol] -6 | | | | | | | | 0 | 0 | 131 | 50757 | 0 | 0 | 0 | 72 | 1066 |
| [symbol] -7 | | | | | | | | 0 | 0 | 0 | 82830 | 0 | 14493 | 14493 | 3535 | 1266 |
| [symbol] -8 | | | | | | | | 0 | 250 | 0 | 77383 | 0 | 1094 | 1094 | 0 | 1990 |
| [symbol] | | | | | | | | 0 | [symbol] | [symbol] | [symbol] | 0 | 7 [symbol] | 0 | 234 | 1 [symbol] |
| [symbol] -11 | | | | | | | | 0 | [symbol] | [symbol] 3 | 7 [symbol] | 0 | [symbol] 13 | 0 | 4 [symbol] | [symbol] 3 |
| [symbol] -12 | | | | | | | | 0 | [symbol] | 1 [symbol] | [symbol] | 0 | 142 [symbol] 1 | 0 | [symbol] 3 | 7 [symbol] |
| [symbol] | | | | | | | | 0 | 11 | [symbol] | 7 [symbol] | 0 | [symbol] 4 | 0 | 0 | 12 [symbol] |
| [symbol] -1 | | | | | | | | 0 | [symbol] | [symbol] | 47 [symbol] | 0 | [symbol] | 0 | 0 | 177 [symbol] |
| [symbol] -2 | | | | | | | | 0 | 34 | 0 | [symbol] | 0 | [symbol] 777 | 0 | 0 | [symbol] |
| [symbol] -3 | | | | | | | | 0 | [symbol] | 7 [symbol] | [symbol] 21 | 0 | 23 [symbol] | 0 | [symbol] | [symbol] |
| [symbol] -4 | | | | | | | | 0 | [symbol] | [symbol] | [symbol] | 0 | 1 [symbol] 11 | 0 | [symbol] | [symbol] 3 |
| [symbol] -5 | | | | | | | | 0 | 213 | [symbol] | [symbol] | 0 | 3713 | 0 | 0 | [symbol] |
| [symbol] -6 | | | | | | | | 0 | 52 | 541 | [symbol] 183 | 0 | [symbol] | 0 | 364 | [symbol] 1 |
| [symbol] | | | | | | | | 0 | [symbol] | 0 | 487 [symbol] | 0 | 0 | 0 | [symbol] | [symbol] |
| [symbol] | | | | | | | | 0 | [symbol] | 0 | [symbol] | 0 | [symbol] | 0 | 19 | 4 [symbol] |
| MCT-114-7 | | | | | | | [symbol] | 0 | [symbol] | 4742 | [symbol] 1 [symbol] 1 | 0 | [symbol] | 0 | 0 | [symbol] |
| MCT-114-8 | | | | | | | [symbol] | 0 | [symbol] | [symbol] | [symbol] | 0 | [symbol] | 0 | 0 | [symbol] |
| [symbol] -1 | | | | | | | [symbol] | 0 | 173 | [symbol] | 222 [symbol] | 0 | 1 [symbol] | 0 | 72 | 1 [symbol] |
| [symbol] -7 | | | | | | | [symbol] | 0 | [symbol] | 77 [symbol] | [symbol] 45 | 0 | 2302 | 0 | 0 | 1781 |
| [symbol] -8 | | | | | | | [symbol] | 0 | 187 | 1201 | 47 [symbol] 37 | 0 | 27 [symbol] | 0 | 315 | [symbol] |
| [symbol] -7 | | | | | | | [symbol] | 0 | 0 | [symbol] 0 | [symbol] 74 | 0 | [symbol] 0 | 0 | [symbol] | 441 |
| [symbol] -8 | | | | | | | [symbol] | 0 | 45 | [symbol] 43 | [symbol] | 0 | [symbol] | 0 | 0 | 4 [symbol] |
| [symbol] | | | | | | | [symbol] | 0 | 254 | 114 | [symbol] | 0 | 1 [symbol] | 0 | 124 | [symbol] |
| [symbol] | | | | | | | [symbol] | 0 | [symbol] 7 | 178 | [symbol] | 0 | 411 [symbol] | 0 | 0 | 1 [symbol] 1 |
| [symbol] -7 | | | | | | | [symbol] | 0 | 0 | 2013 | [symbol] 11 | 0 | [symbol] 40 | 0 | 141 | [symbol] |
| [symbol] -8 | | | | | | | [symbol] | 0 | 1 [symbol] | 1425 | [symbol] | 0 | 413 [symbol] | 0 | 12 [symbol] | 1371 |
| [symbol] | | | | | | | [symbol] | 0 | [symbol] | 0 | [symbol] 1 | 0 | [symbol] 34 | 0 | 140 | [symbol] |
| [symbol] | | | | | | | [symbol] | 0 | 0 | [symbol] 00 | [symbol] | 0 | [symbol] 734 | 0 | 0 | [symbol] |
| [symbol] | | | | | | | [symbol] | 0 | 1101 | [symbol] | [symbol] | 0 | [symbol] | 0 | 0 | 27 [symbol] |
| [symbol] | | | | | | | [symbol] | 0 | [symbol] | 474 | 13421 | 0 | 1 | 0 | 0 | [symbol] 71 |
| [symbol] | | | | | | | [symbol] | 0 | 20 [symbol] | 0 | [symbol] 7 | 0 | 234 | 0 | [symbol] | 342 |
| [symbol] | | | | | | | [symbol] | 0 | 104 | 0 | 23 [symbol] 03 | 0 | [symbol] 1 | 0 | 273 | 1 [symbol] |
| [symbol] | | | | | | | [symbol] | 0 | 1303 | 1034 | 31 [symbol] 2 | 0 | [symbol] | 0 | 2 [symbol] | [symbol] |
| [symbol] | | | | | | | [symbol] | 0 | [symbol] | 4 [symbol] 3 | [symbol] 435 | 0 | 117 [symbol] | 0 | [symbol] | 143 [symbol] |
| [symbol] | | | | | | | [symbol] | 0 | 1123 | 0 | [symbol] | 0 | 10 [symbol] | 0 | 330 | 87 [symbol] |
| [symbol] | | | | | | | [symbol] | 0 | 21 [symbol] | 7 [symbol] | [symbol] 01 [symbol] | 0 | [symbol] 1 | 0 | [symbol] 3 | 7 [symbol] 4 |
| [symbol] | | | | | | | [symbol] | 0 | 1000 | [symbol] 04 | [symbol] 11 | 0 | 0 | 0 | 0 | [symbol] 0 |
| [symbol] | | | | | | | [symbol] | 0 | 7777 | 323 | [symbol] 34 | 0 | [symbol] | 0 | 213 | 1883 |
| [symbol] | | | | | | | [symbol] | 0 | 7 [symbol] 0 | 1 [symbol] 7 | [symbol] 71 | 0 | [symbol] | 0 | 113 | [symbol] 7 [symbol] |
| [symbol] | | | | | | | [symbol] | 0 | 1323 | [symbol] | 33241 | 0 | 112 | 0 | 34 | [symbol] 34 |
| [symbol] | | | | | | | [symbol] | 0 | 44 | [symbol] 22 | [symbol] | 0 | [symbol] | 0 | 0 | [symbol] |
| [symbol] | | | | | | | [symbol] | 0 | 0 | [symbol] 30 | [symbol] 10 | 0 | 10 [symbol] | 0 | 0 | 1105 |
| [symbol] | | | | | | | [symbol] | 0 | [symbol] 6 | 0 | [symbol] | 0 | 142 | 0 | 0 | [symbol] |
| [symbol] | | | | | | | | [symbol] | 310 | 10715 | 147 [symbol] | [symbol] 13 | [symbol] | [symbol] | 0 | 74 [symbol] |
| [symbol] | | | | | | | | 0 | 0 | 1 [symbol] 4 | 137 [symbol] | [symbol] | 83 | [symbol] 1 | 0 | 2241 |
| [symbol] | | | | | | [symbol] | | 110 | 70 | 107 | 37 [symbol] | [symbol] 1 [symbol] | [symbol] | [symbol] 4 | 0 | 1 [symbol] |
| [symbol] | | | | | | | | 0 | 33 | 0 | 4330 | 1 [symbol] 7 | 22 | [symbol] | [symbol] | 7852 |
| [symbol] | | | | | | | | 0 | 30 | 0 | 4042 | [symbol] | 0 | 44 | 0 | [symbol] |
| [symbol] | | | | | | | | [symbol] | 115 | 251 | [symbol] | 14 [symbol] | 1123 | 11 [symbol] | 133 | [symbol] |
| [symbol] | | | | | | | | [symbol] | 145 | [symbol] 74 | 531 [symbol] | 0 | [symbol] 7 | 334 | 0 | [symbol] 3 |
| [symbol] | | | | | | 173 | | 105 | 0 | 0 | 14 [symbol] | [symbol] | 0 | 0 | 0 | 4 [symbol] 7 |
| [symbol] | | | | | | 17 [symbol] | | 45 | 11 [symbol] | 220 | 1 [symbol] 4 | [symbol] 4 | 0 | 0 | 0 | 2710 |
| [symbol] | | | | | | 177 | | 0 | 0 | 0 | 17 [symbol] | 0 | [symbol] | 0 | 103 | 3483 |
| [symbol] | | | | | | | | [symbol] | 0 | 0 | 2152 | 2734 | [symbol] | [symbol] 1 | 80 | [symbol] |
| [symbol] | | | | | | 237 | | [symbol] | 50 | 0 | [symbol] 1 | [symbol] | 41 [symbol] | 1 [symbol] | 77 | [symbol] |
| [symbol] | | | | | | | | [symbol] | 73 | [symbol] 21 | [symbol] 12 | 740 | 1 [symbol] | 181 | [symbol] | [symbol] |
| [symbol] | | | | | | | | 0 | 0 | [symbol] 1 | 3370 | 0 | [symbol] | 0 | 111 | [symbol] |
| [symbol] | | | | | | | | 0 | 0 | 0 | 4530 | 0 | 0 | 0 | 0 | 474 |
| [symbol] | | | | | | | | [symbol] | [symbol] 7 | 43 [symbol] | [symbol] | [symbol] | [symbol] | 37 [symbol] | 11 | [symbol] |
| [symbol] | | | | | | | | [symbol] | 0 | [symbol] 11 | 12 [symbol] 1 | [symbol] 2 | 4 [symbol] | 1030 | 24 [symbol] | [symbol] |
| [symbol] | | | | | | | | [symbol] | 0 | 7025 | 1 [symbol] 3 | [symbol] 43 | [symbol] 71 | 0 | 147 | 4771 |
| [symbol] | | | | | | | [symbol] | 0 | 0 | [symbol] 17 | [symbol] | 0 | [symbol] | 0 | 0 | 0 |
| [symbol] | | | | | | | [symbol] | 0 | 211 | 234 | [symbol] | 0 | [symbol] | 0 | [symbol] | 307 |
| [symbol] | | | | | | | [symbol] | 0 | 7 | 37 | [symbol] | 0 | 2413 | 0 | [symbol] | [symbol] |
| [symbol] | | | | | | | [symbol] | 0 | 1 [symbol] | 3 [symbol] 3 | [symbol] 7 [symbol] 7 | 0 | 1 [symbol] | 0 | [symbol] | 130 [symbol] |
| [symbol] | | | | | | | [symbol] | 0 | [symbol] | 0 | [symbol] | 0 | 0 | 0 | 0 | [symbol] 7 |
| [symbol] | | | | | | | [symbol] | 0 | [symbol] | [symbol] 78 | [symbol] | 0 | 1 [symbol] | 0 | 1 [symbol] | [symbol] |
| [symbol] | | | | | | | [symbol] | 0 | 0 | 41 | [symbol] | 0 | 187 | 0 | [symbol] | 1103 |
| [symbol] | | | | | | | [symbol] | 0 | 132 | 0 | 7 [symbol] 72 | 0 | [symbol] | 0 | 0 | [symbol] |
| [symbol] | | | | | | | [symbol] | 0 | 31 | 1 [symbol] 3 | 42341 | 0 | [symbol] | 0 | 0 | [symbol] |
| [symbol] | | | | | | | [symbol] | 0 | 470 | 0 | [symbol] 21 | 0 | 1 [symbol] | 0 | 0 | 12 [symbol] |
| [symbol] | | | | | | | [symbol] | 0 | [symbol] | [symbol] | 30 [symbol] | 0 | [symbol] 17 | 0 | 0 | [symbol] |
| [symbol] | | | | | | | [symbol] | 0 | [symbol] 3 [symbol] | 3 [symbol] 7 | [symbol] 12 | 0 | [symbol] | 0 | 0 | 1004 |
| [symbol] | | | | | | | [symbol] | 0 | 100 | [symbol] 34 | 1 [symbol] | 0 | [symbol] 0 | 0 | [symbol] | [symbol] |
| [symbol] | | | | | | | [symbol] | 0 | [symbol] 0 [symbol] | 4 [symbol] | [symbol] | 0 | 312 | 0 | [symbol] 15 | 1083 |
| [symbol] | | | | | | | [symbol] | 0 | 112 | 4 [symbol] | 27211 | 0 | 1 [symbol] 1 | 0 | 0 | 1 [symbol] |
| [symbol] | | | | | | | [symbol] | 0 | $0 | [symbol] | [symbol] | 0 | [symbol] | 0 | 30 | 1082 |
| [symbol] | | | | | | | [symbol] | 0 | 34 | 17 [symbol] | [symbol] 0 | 0 | 1507 | 0 | [symbol] | 1 [symbol] 34 |
| [symbol] | | | | | | | [symbol] | 0 | 211 | 1013 | [symbol] | 0 | 0 | 0 | [symbol] | [symbol] 7 |
| [symbol] | | | | | | | [symbol] | 0 | 1 [symbol] 1 | [symbol] | [symbol] | 0 | 1041 | 0 | 0 | 434 |
| [symbol] | | | | | | | [symbol] | 0 | 402 | [symbol] 4 | [symbol] | 0 | 1 [symbol] | 0 | [symbol] | [symbol] 11 |
| [symbol] | | | | | | | [symbol] | 0 | 103 | 41 [symbol] | [symbol] | 0 | [symbol] 3 | 0 | 0 | 477 |
| [symbol] | | | | | | | [symbol] | 0 | 3 [symbol] | [symbol] 7 | [symbol] | 0 | [symbol] | 0 | 0 | [symbol] |
| [symbol] | | | | | | | [symbol] | 0 | 1 [symbol] 2 | 0 | [symbol] | 0 | 32 | 0 | [symbol] 4 | [symbol] 1 |
| [symbol] | | | | | | | [symbol] | 0 | 72 | [symbol] 3 | [symbol] | 0 | 11 [symbol] | 0 | 72 | [symbol] |
| [symbol] | | | | | | | [symbol] | 0 | 0 | 0 | [symbol] 441 | 0 | 40 [symbol] | 0 | 0 | [symbol] 01 |
| [symbol] | | | | | | | [symbol] | 0 | 17 [symbol] 7 | 444 | [symbol] 371 | 0 | [symbol] 777 | 0 | [symbol] | [symbol] |
| [symbol] | | | | | | | [symbol] | 0 | 7 [symbol] 7 | [symbol] 0 | [symbol] 0 | 0 | [symbol] | 0 | 0 | 1010 |
| [symbol] | | | | | | | [symbol] | 0 | 12 [symbol] | [symbol] 4 | [symbol] 7 | 0 | [symbol] | 0 | [symbol] | 1571 |
| [symbol] | | | | | | | [symbol] | 0 | [symbol] 4 | 1207 | 21434 | 0 | [symbol] | 0 | 79 | [symbol] 0 |
| [symbol] | | | | | | | [symbol] | 0 | 1 [symbol] 3 | 0 | 4417 [symbol] | 0 | [symbol] 73 | 0 | 32 | 185 |
| [symbol] | | | | | | | [symbol] | 0 | 112 [symbol] | 1 [symbol] | [symbol] | 0 | [symbol] | 0 | 18 | 13 [symbol] |
| [symbol] | | | | | | | [symbol] | 0 | 1 [symbol] | 711 | [symbol] | 0 | 0 | 0 | 83 | [symbol] |
| [symbol] | | | | | | | [symbol] | 0 | [symbol] 0 | 37 [symbol] | 21 [symbol] | 0 | [symbol] | 0 | 30 | 330 |
| [symbol] | | | | | | | [symbol] | 0 | 434 | 0 | 23074 | 0 | 0 | 0 | 123 | 412 |
| [symbol] | | | | | | | [symbol] | 0 | [symbol] | [symbol] 47 | [symbol] | 0 | [symbol] | 0 | 0 | 1217 |
| [symbol] | | | | | | | [symbol] | 0 | [symbol] | [symbol] 4 | [symbol] | 0 | [symbol] | 0 | 302 | [symbol] |
| [symbol] | | | | | | | [symbol] | 0 | 187 | 3251 | [symbol] | 0 | [symbol] | 0 | 120 | [symbol] |
| [symbol] | | | | | | | [symbol] | 0 | 44 | [symbol] | [symbol] 411 | 0 | [symbol] | 0 | 0 | 1700 |
| [symbol] | | | | | | | [symbol] | 0 | [symbol] | 0 | 1 [symbol] 1 | 0 | 112 | 0 | 0 | 57 [symbol] |
| [symbol] | | | | | | | [symbol] | 0 | 0 | [symbol] | 4 [symbol] | 0 | [symbol] 73 | 0 | 0 | [symbol] |
| [symbol] | | | | | | | [symbol] | 0 | 72 | 4 [symbol] | [symbol] | 0 | 101 [symbol] 1 | 0 | [symbol] 1 | [symbol] |
| [symbol] | | | | | | | [symbol] | 0 | 111 | 14 [symbol] | 47 [symbol] | 0 | [symbol] | 0 | 33 | 7 [symbol] |
| [symbol] | | | | | | | [symbol] | 0 | 1 | 22 [symbol] | [symbol] | 0 | 41 [symbol] | 0 | 0 | [symbol] 0 [symbol] |
| [symbol] | | | | | | | [symbol] | 0 | [symbol] 0 | [symbol] 1 | [symbol] 41 [symbol] | 0 | [symbol] | 0 | 0 | 1182 |
| [symbol] | | | | | | | [symbol] | 0 | 0 | [symbol] | [symbol] 7 [symbol] | 0 | [symbol] 7 [symbol] | 0 | 0 | [symbol] |
| [symbol] | | | | | | | | 0 | 0 | 11 [symbol] 3 | 134780 | 0 | 4570 | 0 | 0 | [symbol] 3 |
| [symbol] | | | | | | | | 0 | 0 | [symbol] | 221237 | 0 | 13 [symbol] | 0 | 213 | 7 [symbol] |
| [symbol] | | | | | | | | 0 | 0 | 0 | [symbol] | 0 | [symbol] 1 | 0 | 114 | 11 [symbol] |
| [symbol] | | | | | | | | 0 | 0 | 0 | 11 [symbol] | 0 | [symbol] 3 | 0 | 0 | 11 [symbol] |
| [symbol] | | | | | | | [symbol] | 0 | [symbol] 1 | 0 | [symbol] | 0 | [symbol] | 0 | 0 | [symbol] |
| [symbol] | | | | | | | | 0 | 53 | 0 | [symbol] | 0 | [symbol] | 0 | 0 | 415 |
| [symbol] | | | | | | | | 0 | 12 | 1 | 1 [symbol] 44 | 0 | 232 | 0 | 22 | [symbol] |
| [symbol] | | | | | | | | 0 | [symbol] | [symbol] 7 | [symbol] 1131 | 0 | [symbol] 10 | 0 | 0 | 1 [symbol] 7 |
| [symbol] | | | | | | | | 0 | 22 | 0 | 7 [symbol] | 0 | [symbol] 7 | 0 | 54 | [symbol] 4 |
| [symbol] | | | | | | | | 0 | [symbol] | 1 [symbol] | [symbol] | 0 | [symbol] 7 | 0 | 231 | 110 [symbol] |
| [symbol] | | | | | | | | 0 | [symbol] | 0 | [symbol] 153 | 0 | [symbol] 1 | 0 | 22 [symbol] | 11 [symbol] |
| [symbol] | | | | | | | | 0 | 0 | 0 | 4 [symbol] | 0 | 1 [symbol] | 0 | 72 | 10 [symbol] |
| [symbol] | | | | | | | | 0 | 170 | 0 | [symbol] | 0 | 17 [symbol] | 0 | 0 | 12 [symbol] |
| [symbol] | | | | | | | | 0 | 0 | [symbol] | [symbol] | 0 | [symbol] | 0 | 145 | 111 [symbol] |
| [symbol] | | | | | | | | 0 | 141 | [symbol] | 43120 | 0 | 7770 | 0 | 0 | [symbol] 22 |
| [symbol] -h | | 1 | | | | | | 0 | 230 | 2317 | [symbol] | 2311 | 2289 | 27300 | 540 | [symbol] 5271 |
| [symbol] -h | | 2 | | | | | | 143 | 1230 | 11829 | 2 [symbol] | [symbol] 77 | 8300 | 1 [symbol] | 962 | 13488 |
| [symbol] -h | | 3 | | | | | | 0 | 833 | 3254 | 4804 | 9945 | 4191 | [symbol] | 1113 | 4891 |
| [symbol] -h | | 4 | | | | | | 124 | 308 | 549 | 423 | 452 | 1541 | 1219 | 543 | 3061 |
| [symbol] -h | | 5 | | | | | | 4 [symbol] | 947 | 2451 | 1 [symbol] 4 | 2317 | 2005 | [symbol] | 745 | 12780 |
| [symbol] -h | | 6 | | | | | | 543 | 394 | 1775 | 11763 | 4300 | 4387 | 13 [symbol] 3 | 1111 | 111 [symbol] |
| [symbol] -h | | 7 | | | | | | 342 | 1137 | [symbol] | 66712 | 4422 | [symbol] 9 | 7 [symbol] | 1 [symbol] | 81304 |
| [symbol] -h | | 8 | | | | | | 815 | 531 | [symbol] 2 | [symbol] | 8917 | 4 [symbol] | 77711 | 1148 | 1 [symbol] |
| [symbol] -h | | 9 | | | | | | 0 | 5 [symbol] | [symbol] 71 | [symbol] | [symbol] | 7201 | 90138 | 1500 | 7000 |
| [symbol] -h | | 10 | | | | | | [symbol] | [symbol] | 7234 | 4384 | [symbol] | [symbol] 1 | [symbol] | 1725 | 24754 |
| [symbol] -h | | 11 | | | | | | 10 [symbol] | 1190 | [symbol] | [symbol] | [symbol] | 4324 | 34771 | 2075 | 4 [symbol] |
| [symbol] h | | 12 | | | | | | [symbol] | 1111 | 7 [symbol] | 7 [symbol] | 610 | [symbol] 72 | [symbol] | 1414 | [symbol] |
| [symbol] h | | 13 | | | | | | 246 | 1236 | [symbol] | 4142 | 1439 | 4384 | [symbol] | [symbol] | 11295 |
| [symbol] -h | | 14 | | | | | | [symbol] | [symbol] | 3624 | 77 [symbol] | [symbol] | [symbol] | [symbol] | 1120 | [symbol] |
| [symbol] -h | | 15 | | | | | | 1194 | [symbol] | 3315 | 13138 | [symbol] | [symbol] | [symbol] | 1630 | 87915 |
| [symbol] -h | | 16 | | | | | | 348 | [symbol] | [symbol] | [symbol] | [symbol] | [symbol] | 11314 | 1787 | 13457 |
| [symbol] -h | | 17 | | | | | | 32 | 708 | 3322 | 2344 | 11 [symbol] | 1451 | 41333 | 1114 | 37254 |
| [symbol] -h | | 18 | | | | | | 0 | 534 | 2431 | 8421 | [symbol] | [symbol] | 16871 | 1713 | 19614 |
| [symbol] -h | | 19 | | | | | | [symbol] | 344 | [symbol] | [symbol] | 4979 | 4912 | [symbol] | 1331 | 12378 |
| [symbol] -h | | 20 | | | | | | [symbol] | 264 | [symbol] | 4310 | 17 [symbol] | 544 | [symbol] | 1933 | [symbol] |
| [symbol] -h | | 21 | | | | | | 0 | 438 | 7 [symbol] 11 | [symbol] | [symbol] | 3116 | [symbol] | 1423 | 4737 |
| [symbol] -h | | 22 | | | | | | [symbol] | [symbol] | [symbol] | [symbol] | 3412 | 1391 | [symbol] | [symbol] | [symbol] |
| [symbol] -h | | 23 | | | | | | 0 | 182 | 5215 | [symbol] | 4125 | [symbol] | [symbol] | [symbol] | [symbol] |
| [symbol] -h | | 24 | | | | | | 0 | 443 | 2348 | 32224 | 1851 | 2148 | [symbol] | 1236 | [symbol] |
| [symbol] -h | | 25 | | | | | | [symbol] | [symbol] | [symbol] | 4231 | 29181 | [symbol] | [symbol] | [symbol] | [symbol] |
| [symbol] -h | | 27 | | | | | | 7 [symbol] | 414 | [symbol] | [symbol] | 11139 | 4787 | 11 [symbol] | 342 | 13111 |
| [symbol] | | 28 | | | | 28 | | 703 | 147 | 0 | [symbol] | 1182 | [symbol] | 4272 | 591 | 0 |
| [symbol] -h | | 28 | | | | | | 581 | [symbol] | 1320 | 47 [symbol] | 3198 | [symbol] | [symbol] | [symbol] | [symbol] |
| [symbol] | | 29 | | | | 30 | | 181 | 576 | 0 | 349 | 1033 | 3123 | [symbol] | 773 | 0 |
| [symbol] -h | | 31 | | | | | | 5 [symbol] | 740 | 43 [symbol] | [symbol] | 19717 | 20 [symbol] | 13172 | 1554 | [symbol] |
| [symbol] | | 32 | | | | | | 0 | 944 | 230 | 94 | 115 | 2044 | 1023 | 1192 | 2038 |
| [symbol] -h | | 33 | | | | | | 0 | [symbol] | 2916 | [symbol] | 3000 | 1347 | [symbol] | 1100 | [symbol] |
| [symbol] | | 34 | | | | | | 0 | 2 [symbol] | 0 | 454 | 0 | 2 [symbol] | 1110 | 805 | 0 |
| [symbol] -h | | 35 | | | | | | 0 | 451 | 0 | 312 | 222 | 1622 | [symbol] | 630 | 0 |
| [symbol] -h | | 36 | | | | | | 7 [symbol] | 473 | 443 | 381 | 11 | 1961 | [symbol] | [symbol] | 1375 |
| [symbol] -h | | 37 | | | | | | 0 | 375 | 1 [symbol] | 0 | 0 | 1441 | [symbol] | 720 | 0 |
| [symbol] -h | | 38 | | | | | | 0 | 842 | 0 | 363 | 0 | 3211 | [symbol] | 1054 | [symbol] |
| [symbol] -h | | 39 | | | | | | 0 | 338 | 1343 | 0 | 0 | 1194 | 3363 | [symbol] | 143 |
| [symbol] | | 40 | | | | | | 143 | 572 | 0 | 4 [symbol] | 342 | 2819 | 541 | 1218 | 0 |
| [symbol] -h | | 41 | | | | | | [symbol] | 294 | 518 | 138 | 11 | [symbol] | 0 | [symbol] | 0 |
| [symbol] -h | | 42 | | | | | | 629 | 429 | 0 | 573 | 464 | 1700 | 377 | 2223 | 0 |
| [symbol] -h | | 43 | | | | | | 0 | 421 | 154 | 0 | 14 [symbol] | [symbol] | 1341 | 1285 | 0 |
| [symbol] -h | | 44 | | | | | | [symbol] | 626 | 21 [symbol] | 425 | 3479 | 2371 | [symbol] | 1944 | 0 |
| [symbol] | | | | | [symbol] | | | 0 | 323 | 0 | 0 | 0 | 734 | 53 | 348 | 0 |
| [symbol] | | | | | 34 [symbol] | | | 0 | 0 | 2 [symbol] | 111 | 0 | 120 | 0 | 134 | 0 |
| [symbol] | | | | | 341 | | | 0 | 0 | 0 | [symbol] | 0 | 83 | [symbol] | 145 | 0 |
| [symbol] | | | | | 334 | 35 [symbol] | | 4165 | [symbol] | 34 [symbol] | 634 | 323 | 8377 | 294 | 3419 | [symbol] |
| [symbol] | | | | | 354 | 254 | | 77 [symbol] 5 | 2210 | 1298 | 300 | 50 | [symbol] | 182 | 1521 | [symbol] |
| [symbol] -h | | | | | 344 | | | 0 | 2 [symbol] | 82 | 225 | 35 | 297 | 64 | [symbol] | 0 |
| [symbol] | | | | | 342 | | | 0 | 0 | 32 | [symbol] | 0 | 245 | 0 | 452 | 254 |
| RPTBC | | | | | 234 | 234 | | 0 | 340 | 0 | 0 | 0 | 7 [symbol] | 0 | [symbol] | 0 |
| [symbol] -h | | | | | 332 | | | 0 | 0 | 11 | 19 | 24 | 91 | 45 | 836 | 0 |
| [symbol] | | | | | 330 | | | 80 | 91 | 0 | 47 | 0 | 71 | 0 | 637 | 0 |
| [symbol] -h | | | | | [symbol] | | | [symbol] | [symbol] | 0 | 1912 | 190 | [symbol] | 454 | 1432 | 7234 |
| [symbol] | | | | | 327 | | | 0 | [symbol] | 0 | 171 | 0 | 11$ | 411 | 429 | 0 |
| [symbol] | | | | | 328 | | | 309 | 4779 | 96 | 127 | 0 | [symbol] | 82 | 1824 | 9671 |
| [symbol] | | | | | 321 | | | 218 | 45 | 0 | 0 | 0 | 0 | 72 | 765 | 0 |
| [symbol] | | | | | 3 [symbol] | | | 0 | [symbol] | 0 | 283 | 238 | 2579 | 21 | 1311 | 0 |
| [symbol] -h | | | | | 318 | | | 2410 | 1322 | 724 | 2029 | 2188 | 4302 | 471 | 1067 | [symbol] |
| [symbol] -h | | | | | [symbol] | | | 812 | [symbol] | 0 | 1132 | [symbol] | 2543 | 0 | 701 | 1532 |
| [symbol] -h | | | | | 214 | | | 185 | 271 | 0 | 7 [symbol] | [symbol] | 2242 | 323 | 730 | 2522 |
| [symbol] -h | | | | | 211 | | | 0 | 0 | 0 | 183 | 47 | 53 | 251 | 1072 | 0 |
| [symbol] h | | | | | [symbol] | | | [symbol] | [symbol] | 47 | 136 | 242 | 100 | 147 | 462 | 0 |
| [symbol] -h | | | | | [symbol] | | | 306 | 610 | 154 | 494 | 89 | 1474 | 0 | 401 | 0 |
| [symbol] -h | | | | | 206 | | | 0 | 79 | 0 | 307 | 200 | 129 | [symbol] | 740 | 0 |
| [symbol] -h | | | | | [symbol] | | | 0 | 1575 | 0 | [symbol] | 675 | 1375 | 46 | 833 | 0 |
| [symbol] -h | | | | | 302 | | | 0 | 0 | 3944 | 123 | 72 | 208 | [symbol] | [symbol] | 228 |
| [symbol] -h | | | | | 2 [symbol] | | | 77 [symbol] | [symbol] | 21 [symbol] | [symbol] | 3723 | [symbol] | 1230 | 1487 | 4479 |
| [symbol] -h | | | | | [symbol] | | | 2006 | 4 [symbol] | 0 | [symbol] | [symbol] | 2775 | 0 | 2119 | 1673 |
| [symbol] -h | | | | | [symbol] | | | 0 | [symbol] | 0 | [symbol] | 815 | [symbol] | [symbol] 41 | 531 | 0 |
| [symbol] -h | | | | | [symbol] | | | 1237 | 1442 | 0 | 1966 | 799 | 2831 | 70 | 1713 | [symbol] |
| [symbol] -h | | | | | [symbol] | | | 0 | 0 | 0 | 1413 | 285 | 810 | 0 | [symbol] | [symbol] |
| [symbol] -h | | | | | 229 | | | 1424 | 482 | 0 | 3317 | [symbol] 5 | [symbol] 7 | 777 | [symbol] | 2243 |
| [symbol] -h | | | | | 279 | | | 22 [symbol] | 171 | 0 | 0 | 0 | 855 | 299 | 495 | 0 |
| [symbol] -h | | | | | 271 | | | 0 | 744 | 0 | 0 | 249 | 1362 | 374 | 944 | 0 |
| [symbol] | | | | | 276 | 275 | | 0 | 14 | 687 | 0 | 0 | 407 | 181 | 801 | 0 |
| [symbol] | | | | | [symbol] | | | 0 | 7 | 0 | [symbol] | 113 | 284 | 154 | 563 | 0 |
| [symbol] | | | | | [symbol] | | | 0 | 0 | 1147 | 161 | 0 | 0 | 245 | 738 | 752 |
| [symbol] 11 | | | | | 239 | 230 | | 0 | 300 | 222 | 357 | [symbol] | 531 | 2987 | 1400 | 0 |
| [symbol] 5 | | | | | 225 | 235 | | 0 | [symbol] | [symbol] | 127 | 40 | 0 | 481 | 751 | 0 |
| HT27 [symbol] | | | | | 234 | | | 79 | 1472 | 0 | 191 | 104 | 1276 | 0 | 1522 | 0 |
| [symbol] 7 | | | | | [symbol] | 223 | | 0 | 234 | 447 | 153 | 0 | 70 | 10 [symbol] | [symbol] 62 | 0 |
| [symbol] 8 | | | | | 231 | 231 | | 0 | 525 | 255 | 217 | 81 | 229 | 2538 | 817 | 0 |
| [symbol] 2 | | | | | 229 | 229 | | 314 | 815 | 0 | 12 | 25 | 994 | [symbol] | 719 | 0 |
| [symbol] 1 | | | | | 227 | 227 | | 194 | 287 | 0 | 0 | 2 | 82 | 1067 | [symbol] 47 | 0 |
| [symbol] -h | | | | | 222 | | | 0 | 57 | 0 | 0 | [symbol] | [symbol] | 48 | 453 | 0 |
| Heart-h | | | | | 215 | | | 0 | 406 | 0 | 0 | 0 | 3 [symbol] | 0 | 1007 | 0 |
| [symbol] -h | | | | | 214 | | | 0 | 299 | 291 | 183 | 230 | 141 | [symbol] | 976 | 0 |
| [symbol] -h | | | | | 213 | | | [symbol] | [symbol] | 147 | 0 | 57 | 0 | 152 | 1042 | 0 |
| [symbol] -h | | | | | 212 | | | 0 | 339 | 0 | 267 | 614 | 537 | 633 | [symbol] | 0 |
| HCAEC | | | | | 211 | 211 | | 0 | 67 | 0 | 0 | 99 | 0 | 254 | 793 | 0 |
| [symbol] -h | | | | | 219 | | | 0 | 179 | 0 | 2 [symbol] | 0 | 180 | [symbol] | 580 | 0 |
| [symbol] | | | | | 20 [symbol] | | | 0 | 317 | 0 | [symbol] | 0 | [symbol] | 0 | 731 | 0 |
| [symbol] -h | | | | | 20 [symbol] | | | 0 | 180 | 92 | 0 | 0 | 733 | 0 | 765 | 71 |
| [symbol] -h | | | | | 303 | | | 0 | 141 | 279 | [symbol] | 0 | 115 | 0 | 991 | 0 |
| [symbol] | | | | | 291 | | | 81 | 473 | 0 | 125 | 0 | [symbol] 44 | 0 | [symbol] | 0 |
| [symbol] -h | | | | | 189 | | | 95 | 104 | 0 | 111 | 140 | 122 | 0 | 72$ | 0 |
| [symbol] -h | | | | | 187 | | | 143 | 0 | 0 | 223 | 110 | 43 | 422 | 534 | 0 |
| [symbol] | | | | | 185 | | | 0 | 99 | 0 | 156 | 76 | [symbol] | 0 | 367 | 0 |
| [symbol] -h | | | | | 183 | | | 453 | 452 | 0 | 348 | 119 | 2341 | 109 | 806 | 0 |
| [symbol] | | | | | 179 | | | 0 | 178 | 0 | 0 | 78 | 286 | 0 | 371 | 0 |
| [symbol] -h | | | | | 81 | | | 0 | 573 | 0 | 0 | 189 | 1195 | 64 | [symbol] | 0 |
| [symbol] -h | | | | | [symbol] | | | 0 | 2301 | 0 | 778 | 700 | 2537 | [symbol] | [symbol] | 0 |
| [symbol] -h | | | | | [symbol] | | | 0 | [symbol] | 240 | 742 | 192 | [symbol] | 93 | [symbol] | 0 |
| [symbol] -h | | | | | [symbol] | | | 94 | 973 | 0 | 279 | 118 | [symbol] | 0 | 822 | 0 |
| [symbol] -h | | | | | 63 | | | 251 | 409 | [symbol] | [symbol] | 0 | 814 | 0 | 447 | 0 |
| [symbol] -h | | | | | 61 | | | 0 | 0 | 314 | 20 | 43 | 434 | 394 | 329 | 0 |
| [symbol] -h | | | | | [symbol] | | | 0 | 92 | 311 | 213 | 139 | 492 | 0 | 799 | 0 |
| [symbol] | | | | 78 | | | | 0 | [symbol] | 113 | 299 | 0 | 328 | 434 | 774 | 370 |
| [symbol] | | | | 81 | | | | 0 | 337 | 0 | 201 | 0 | [symbol] | 202 | 778 | 0 |
| [symbol] | | | | 83 | | | | 0 | 243 | 0 | 212 | 0 | 341 | 231 | 1374 | 0 |
| [symbol] | | | | [symbol] | | | | [symbol] | [symbol] | 0 | 256 | 51 | 473 | 0 | 649 | 0 |
| [symbol] | | | | [symbol] | | | | 294 | [symbol] | 0 | 449 | 75 | 5211 | 1347 | 2170 | 0 |
| [symbol] | | | | 92 | | | | 349 | 235 | 0 | 300 | 217 | 3141 | 170 | 1054 | [symbol] |
| [symbol] | | | | 92 | | | | 0 | 0 | 0 | 295 | 219 | [symbol] | 313 | 1114 | 23 |
| [symbol] | | | | 94 | | | | 0 | 125 | 0 | 123 | 11 | 0 | 199 | 1073 | 0 |
| [symbol] | | | | [symbol] | | | | [symbol] | 210 | [symbol] | 18 | 123 | 172 | 247 | 1399 | 0 |
| [symbol] | | | | 145 | | | | 540 | 11 | 240 | 330 | 1143 | 671 | 42 | 170 | 0 |
| [symbol] | | | | 145 | | | | 0 | 0 | 0 | 279 | 1314 | 165 | 54 | 431 | 0 |
| [symbol] | | | | [symbol] | | | | 372 | 194 | 104 | [symbol] | 1241 | 0 | 0 | 343 | 0 |
| [symbol] | | | | 132 | | | | 0 | 121 | 0 | 124 | 553 | 1020 | 91 | 230 | 243 |
| [symbol] | | | | 154 | | | | 0 | 342 | 0 | 200 | 327 | 791 | 327 | 340 | 0 |
| [symbol] | | | | [symbol] | | | | 0 | 443 | 299 | 173 | 619 | 830 | 0 | 182 | 0 |
| [symbol] | | | | [symbol] | | | | 0 | 47 | 0 | 371 | 342 | 0 | 0 | 742 | 4919 |
| [symbol] | | | | [symbol] | | | | 231 | 343 | 453 | 175 | 255 | 20 | 233 | [symbol] | 1977 |
| [symbol] | | | | 162 | | | | 349 | 0 | 0 | 0 | [symbol] | 332 | 0 | 304 | 0 |
| HCT [symbol] | | | | 1 [symbol] | | | | 337 | 203 | 344 | 83 | 102 | 0 | 0 | 199 | 0 |
| [symbol] | | | | 106 | | | | 0 | 377 | [symbol] | 131 | 1114 | 213 | 82 | 203 | 0 |
| T [symbol] | | | | [symbol] | | | | 230 | [symbol] | 21 | 45 | [symbol] | [symbol] | [symbol] | [symbol] | 0 |
| T [symbol] | | | | [symbol] | | | 0 | [symbol] | [symbol] | [symbol] | 104 | [symbol] | [symbol] | [symbol] | [symbol] | 0 |
| [symbol] | | | | 171 | | | | 0 | 3 | 120 | [symbol] | [symbol] | [symbol] | [symbol] | 530 | [symbol] |
| [symbol] | | | | 181 | | | | 31 | [symbol] | [symbol] | 1 | 81 | 247 | [symbol] | [symbol] | 0 |
| [symbol] | | | | 183 | | | | 0 | [symbol] | [symbol] | 0 | 123 | [symbol] | [symbol] | [symbol] | 0 |
| [symbol] | | | | 184 | | | | 0 | 0 | 203 | 270 | [symbol] | 237 | 0 | [symbol] | 0 |
| [symbol] | | | | 1 [symbol] | | | | 0 | 0 | 121 | 130 | 163 | [symbol] | 0 | [symbol] | 0 |
| [symbol] | | | | 1 [symbol] | | | | 118 | [symbol] | 0 | 87 | [symbol] | [symbol] | 0 | [symbol] | 0 |
| [symbol] | | | | 200 | | | | 227 | [symbol] | 0 | [symbol] | [symbol] | 1221 | 167 | [symbol] | 0 |
| [symbol] | | | | 202 | | | | 0 | 76 | 137 | 0 | 167 | 130 | 172 | [symbol] | 0 |
| [symbol] | | | | 204 | | | | [symbol] | [symbol] | [symbol] | 0 | 73 | [symbol] | [symbol] | 431 | 0 |
| [symbol] | | | | 205 | | | | 0 | 0 | [symbol] | 0 | [symbol] | [symbol] | 0 | [symbol] | 10 |
| [symbol] | | | | 206 | | | | 712 | 1711 | 0 | 351 | 360 | 1345 | 0 | 850 | 0 |
| [symbol] | | | | 216 | | | | 347 | 151 | [symbol] | 27 | [symbol] | 0 | 0 | [symbol] | 0 |
| [symbol] | | | | 218 | | | | 0 | [symbol] | 0 | 111 | 30 | 118 | 0 | [symbol] | 0 |
| [symbol] | | | | 220 | | | | 0 | 0 | 82 | 138 | 41 | 222 | 0 | [symbol] | 0 |
| [symbol] | | | | 221 | | | | 0 | 48 | 0 | 0 | 42 | 212 | [symbol] | [symbol] | 0 |
| [symbol] | | | | 223 | | | | 0 | 140 | 181 | 117 | 100 | 117 | 0 | 478 | [symbol] |
| [symbol] | | | | 225 | | | | 0 | 172 | 204 | 31 | 0 | 80 | 0 | 407 | 0 |
| [symbol] | | | | 241 | | | | 0 | 0 | 197 | 155 | [symbol] | [symbol] | [symbol] | [symbol] | 1088 |
| [symbol] | | | | 242 | | | | 10 | 0 | 173 | 304 | [symbol] | [symbol] | [symbol] | [symbol] | 0 |
| [symbol] | | | | 243 | | | | [symbol] | 202 | 10 | 370 | [symbol] | 720 | 370 | [symbol] | 0 |
| [symbol] | | | | 244 | | | | [symbol] | [symbol] | 0 | 372 | [symbol] | 330 | 84 | 10 | 817 |
| [symbol] | | | | 245 | | | | [symbol] | [symbol] | 834 | [symbol] | [symbol] | [symbol] | 0 | [symbol] | 0 |
| [symbol] | | | | 246 | | | | 0 | [symbol] | 847 | [symbol] | [symbol] | 0 | 0 | [symbol] | 0 |
| [symbol] | | | | 247 | | | | [symbol] | [symbol] | 0 | 312 | [symbol] | [symbol] | [symbol] | [symbol] | [symbol] |
| [symbol] | | | | 248 | | | | 0 | 122 | 0 | 229 | [symbol] | [symbol] | 0 | 425 | 0 |
| [symbol] | | | | 249 | | | | 0 | 0 | 1127 | 221 | [symbol] | [symbol] | 215 | [symbol] | [symbol] |
| [symbol] | | | | 250 | | | | 10 | 423 | 54 | 448 | [symbol] | [symbol] | [symbol] | [symbol] | [symbol] |
| [symbol] | | | | 251 | | | | 0 | [symbol] | 421 | 79 | [symbol] | [symbol] | 0 | [symbol] | 0 |
| [symbol] | | | | 252 | | | | [symbol] | 370 | 0 | 207 | 42 | 34 | 0 | 41 | 0 |
| [symbol] | | | | 253 | | | | 0 | 816 | 0 | 73 | [symbol] | [symbol] | 0 | [symbol] | [symbol] |
| [symbol] | | | | 254 | | | | [symbol] | [symbol] | [symbol] | 0 | [symbol] | [symbol] | [symbol] | [symbol] | 0 |
| [symbol] | | | | 255 | | | | [symbol] | 0 | 0 | 10 | [symbol] | [symbol] | 0 | [symbol] | 0 |
| [symbol] | | | | 256 | | | | [symbol] | [symbol] | 434 | 732 | [symbol] | [symbol] | [symbol] | [symbol] | 0 |
| [symbol] | | | | 257 | | | | 0 | [symbol] | [symbol] | 454 | [symbol] | [symbol] | [symbol] | [symbol] | 0 |
| [symbol] | | | | 258 | | | | 0 | [symbol] | 0 | 83 | 47 | [symbol] | 0 | [symbol] | 0 |
| [symbol] | | | | 259 | | | | 0 | [symbol] | 0 | 0 | [symbol] | [symbol] | [symbol] | [symbol] | 0 |
| [symbol] | | | | 260 | | | | 211 | 0 | 0 | 0 | [symbol] | [symbol] | 0 | [symbol] | 0 |
| [symbol] | | | | 261 | | | | 0 | [symbol] | 0 | 150 | [symbol] | [symbol] | 0 | [symbol] | 0 |
| [symbol] | | | | 262 | | | | 0 | [symbol] | 7839 | [symbol] | [symbol] | [symbol] | [symbol] | [symbol] | [symbol] |
| [symbol] | | | | 263 | | | | [symbol] | [symbol] | 780 | 287 | [symbol] | [symbol] | [symbol] | [symbol] | 0 |
| [symbol] | | | | 264 | | | | 0 | [symbol] | [symbol] | 70 | [symbol] | [symbol] | [symbol] | [symbol] | 0 |
| [symbol] | | | | 265 | | | | [symbol] | [symbol] | [symbol] | 70 | [symbol] | [symbol] | [symbol] | [symbol] | 0 |
| [symbol] | | | | 266 | | | | [symbol] | 0 | [symbol] | 2372 | [symbol] | [symbol] | [symbol] | [symbol] | 0 |
| [symbol] | | | | 267 | | | | 0 | 1211 | [symbol] | 128 | [symbol] | [symbol] | [symbol] | [symbol] | 400 |
| [symbol] | | | | 268 | | | | 0 | [symbol] | [symbol] | 41 | [symbol] | [symbol] | [symbol] | [symbol] | 0 |
| [symbol] | | | | 269 | | | | [symbol] | [symbol] | [symbol] | 0 | [symbol] | [symbol] | [symbol] | [symbol] | 1831 |
| [symbol] | | | | 270 | | | | 0 | 77 | 227 | 318 | [symbol] | [symbol] | [symbol] | [symbol] | 0 |
| [symbol] | | | | 271 | | | | 0 | 0 | 147 | 1711 | [symbol] | [symbol] | [symbol] | [symbol] | 0 |
| [symbol] | | | | 272 | | | | 0 | 0 | [symbol] | 219 | [symbol] | [symbol] | [symbol] | [symbol] | 0 |
| [symbol] | | | | [symbol] | | | | 0 | 1972 | 207 | 141 | [symbol] | [symbol] | [symbol] | [symbol] | 3088 |
| [symbol] | | | | [symbol] | | | | [symbol] | 0 | 0 | 123 | [symbol] | [symbol] | [symbol] | [symbol] | 0 |
| [symbol] | | | | [symbol] | | | | 0 | [symbol] | 0 | 222 | [symbol] | [symbol] | [symbol] | [symbol] | 4198 |
| [symbol] | | | | [symbol] | | | | [symbol] | [symbol] | 0 | 0 | [symbol] | [symbol] | [symbol] | [symbol] | 0 |
| [symbol] | | | | [symbol] | | | | 0 | [symbol] | 0 | 0 | [symbol] | [symbol] | [symbol] | [symbol] | 0 |
| [symbol] | | | | [symbol] | | | | 0 | [symbol] | 219 | [symbol] | [symbol] | [symbol] | [symbol] | [symbol] | 3114 |
| [symbol] | | | | [symbol] | | | | [symbol] | [symbol] | 0 | [symbol] | [symbol] | [symbol] | [symbol] | [symbol] | 2184 |
| [symbol] | | | | [symbol] | | | | [symbol] | [symbol] | 23 | 2318 | [symbol] | [symbol] | [symbol] | [symbol] | 0 |
| [symbol] | | | | [symbol] | | | | [symbol] | [symbol] | 0 | 232 | [symbol] | [symbol] | [symbol] | [symbol] | [symbol] |
| [symbol] | | | | [symbol] | | | | [symbol] | [symbol] | 0 | 842 | [symbol] | [symbol] | [symbol] | [symbol] | 0 |
| [symbol] | | | | [symbol] | | | | [symbol] | [symbol] | 280 | 44 | [symbol] | [symbol] | [symbol] | [symbol] | 0 |
| [symbol] | | | | [symbol] | | | | [symbol] | [symbol] | 0 | 20 | [symbol] | [symbol] | [symbol] | [symbol] | 0 |
| [symbol] | | | | [symbol] | | | | 0 | [symbol] | 100 | 0 | [symbol] | [symbol] | [symbol] | [symbol] | 0 |
| [symbol] | | | | [symbol] | | | | 0 | [symbol] | 0 | [symbol] | [symbol] | [symbol] | [symbol] | [symbol] | 0 |
| [symbol] | | | | [symbol] | | | | 0 | [symbol] | 41 | 0 | [symbol] | [symbol] | [symbol] | [symbol] | 0 |
| [symbol] | | | | [symbol] | | | | 0 | [symbol] | 0 | [symbol] | [symbol] | [symbol] | [symbol] | [symbol] | [symbol] |
| [symbol] | | | | [symbol] | | | | 0 | [symbol] | 0 | 0 | [symbol] | [symbol] | [symbol] | [symbol] | 0 |
| [symbol] | | | | [symbol] | | | | [symbol] | [symbol] | 628 | 277 | [symbol] | [symbol] | [symbol] | [symbol] | [symbol] |
| [symbol] | | | | [symbol] | | | | 0 | [symbol] | 183 | 434 | [symbol] | [symbol] | [symbol] | [symbol] | [symbol] |
| [symbol] | | | | [symbol] | | | | [symbol] | [symbol] | 0 | [symbol] | [symbol] | [symbol] | [symbol] | [symbol] | [symbol] |
| [symbol] | | | | [symbol] | | | | [symbol] | [symbol] | 0 | [symbol] | [symbol] | [symbol] | [symbol] | [symbol] | [symbol] |
| [symbol] | | | | [symbol] | | | | [symbol] | [symbol] | 0 | [symbol] | [symbol] | [symbol] | [symbol] | [symbol] | 0 |
| [symbol] | | | 50 | | | | | 0 | [symbol] | 0 | 0 | [symbol] | [symbol] | [symbol] | [symbol] | 0 |
| [symbol] | | | 52 | | | | | 0 | [symbol] | [symbol] | 237 | [symbol] | [symbol] | [symbol] | [symbol] | 0 |
| [symbol] | | | 54 | | | | | 0 | [symbol] | 0 | 0 | [symbol] | [symbol] | [symbol] | [symbol] | 0 |
| [symbol] | | | 55 | | | | | 0 | [symbol] | 130 | 37 | [symbol] | [symbol] | [symbol] | [symbol] | [symbol] |
| [symbol] | | | 56 | | | | | 0 | [symbol] | 0 | 0 | [symbol] | [symbol] | [symbol] | [symbol] | [symbol] |
| [symbol] | | | 60 | | | | | 0 | [symbol] | 0 | 47 | [symbol] | [symbol] | [symbol] | [symbol] | [symbol] |
| [symbol] | | | 62 | | | | | 0 | [symbol] | 0 | 412 | [symbol] | [symbol] | [symbol] | [symbol] | 364 |
| [symbol] | | | 63 | | | | | [symbol] | [symbol] | 0 | 0 | [symbol] | [symbol] | [symbol] | [symbol] | 0 |
| [symbol] | | | 64 | | | | | 0 | [symbol] | 18 | 234 | [symbol] | [symbol] | [symbol] | [symbol] | 0 |
| [symbol] | | | 65 | | | | | 0 | [symbol] | 0 | 183 | [symbol] | [symbol] | [symbol] | [symbol] | 0 |
| [symbol] | | | 66 | | | | | 0 | [symbol] | 83 | 34 | [symbol] | [symbol] | [symbol] | [symbol] | 0 |
| [symbol] | | | 67 | | | | | 0 | [symbol] | 0 | 294 | [symbol] | [symbol] | [symbol] | [symbol] | 0 |
| [symbol] | | | 68 | | | | | 0 | 0 | 0 | 178 | [symbol] | [symbol] | [symbol] | [symbol] | 0 |
| [symbol] | | | 69 | | | | | 0 | [symbol] | 0 | 77 | [symbol] | [symbol] | [symbol] | [symbol] | 0 |
| [symbol] | | | 70 | | | | | [symbol] | [symbol] | [symbol] | 20 | [symbol] | [symbol] | 0 | [symbol] | 37 |
| [symbol] | | | 71 | | | | | 0 | [symbol] | [symbol] | 474 | [symbol] | [symbol] | 0 | [symbol] | 0 |
| [symbol] | | | 72 | | | | | 0 | [symbol] | 0 | 230 | [symbol] | [symbol] | [symbol] | [symbol] | 0 |
| [symbol] | | | 73 | | | | | [symbol] | [symbol] | 234 | 187 | [symbol] | [symbol] | 0 | [symbol] | 381 |
| [symbol] | | | 74 | | | | | [symbol] | [symbol] | 0 | 234 | [symbol] | [symbol] | 0 | [symbol] | 0 |
| [symbol] | | | 76 | | | | | 0 | [symbol] | 0 | 222 | [symbol] | [symbol] | 0 | [symbol] | 0 |
| [symbol] | | | 77 | | | | | 0 | [symbol] | 0 | 730 | [symbol] | [symbol] | [symbol] | [symbol] | 0 |
| [symbol] | | | 79 | | | | | [symbol] | [symbol] | 0 | 308 | [symbol] | 470 | 0 | [symbol] | 277 |
| [symbol] | | | 80 | | | | | 0 | [symbol] | 0 | 483 | [symbol] | [symbol] | 0 | [symbol] | [symbol] |
| [symbol] | | | 82 | | | | | 0 | [symbol] | 200 | 112 | [symbol] | [symbol] | 0 | [symbol] | 0 |
| [symbol] | | | 85 | | | | | [symbol] | [symbol] | 0 | 128 | [symbol] | [symbol] | [symbol] | [symbol] | 0 |
| [symbol] | | | 87 | | | | | [symbol] | [symbol] | [symbol] | 20 | [symbol] | [symbol] | [symbol] | [symbol] | 0 |
| [symbol] | | | 170 | | | | | 0 | [symbol] | 0 | 158 | [symbol] | [symbol] | [symbol] | [symbol] | 0 |
| [symbol] | | | 189 | | | | | 0 | [symbol] | 0 | 0 | [symbol] | [symbol] | [symbol] | [symbol] | 0 |
| [symbol] | | | 187 | | | | | [symbol] | [symbol] | 0 | 12 | [symbol] | [symbol] | [symbol] | [symbol] | 0 |
| [symbol] | | | 188 | | | | | 0 | 1097 | 0 | 82 | [symbol] | [symbol] | [symbol] | [symbol] | 0 |
| [symbol] | | | 191 | | | | | 0 | 277 | 0 | 195 | [symbol] | [symbol] | [symbol] | [symbol] | 0 |
| [symbol] | | | 207 | | | | | 0 | 281 | 7 | 187 | [symbol] | [symbol] | [symbol] | [symbol] | 182 |
| [symbol] | | | 216 | | | | | 0 | 0 | 0 | 100 | [symbol] | [symbol] | [symbol] | [symbol] | 138 |
| [symbol] | | | 217 | | | | | [symbol] | 0 | 0 | 43 | [symbol] | [symbol] | [symbol] | [symbol] | 0 |
| [symbol] | | | 224 | | | | | 0 | 0 | 0 | 275 | [symbol] | [symbol] | [symbol] | [symbol] | 0 |
| [symbol] | | | 226 | | | | | 0 | 1088 | 173 | 294 | [symbol] | [symbol] | [symbol] | [symbol] | 0 |
| [symbol] | | | 228 | | | | | [symbol] | 218 | 0 | 0 | [symbol] | [symbol] | [symbol] | [symbol] | 0 |
| [symbol] | | | 230 | | | | | 0 | 247 | 0 | [symbol] | [symbol] | [symbol] | [symbol] | [symbol] | 0 |
| [symbol] | | | [symbol] | | | | | 0 | 172 | 0 | [symbol] | [symbol] | [symbol] | [symbol] | [symbol] | [symbol] |
| [symbol] | | | [symbol] | | | | | 0 | 71 | 283 | [symbol] | [symbol] | [symbol] | [symbol] | [symbol] | [symbol] |
| [symbol] | | | [symbol] | | | | | 0 | 38 | 0 | [symbol] | [symbol] | [symbol] | [symbol] | [symbol] | 0 |
| [symbol] | | | [symbol] | | | | | 0 | 1248 | 930 | [symbol] | [symbol] | [symbol] | [symbol] | [symbol] | 0 |
| [symbol] | | | [symbol] | | | | | 0 | 2033 | 0 | [symbol] | [symbol] | [symbol] | [symbol] | [symbol] | 0 |
| [symbol] | | | [symbol] | | | | | 0 | 44 | 0 | [symbol] | [symbol] | [symbol] | [symbol] | [symbol] | 0 |
| [symbol] | | | [symbol] | | | | | [symbol] | 0 | 0 | [symbol] | [symbol] | [symbol] | [symbol] | [symbol] | 0 |
| [symbol] | | | [symbol] | | | | | 0 | 98 | 0 | [symbol] | [symbol] | [symbol] | [symbol] | [symbol] | 0 |
| [symbol] | | | 318 | | | | | 0 | 0 | 0 | [symbol] | [symbol] | [symbol] | [symbol] | [symbol] | 0 |
| [symbol] | | | 328 | | | | | [symbol] | 0 | 0 | [symbol] | [symbol] | [symbol] | [symbol] | [symbol] | 0 |
| [symbol] | | | 283 | | | | | 0 | 0 | 0 | [symbol] | [symbol] | [symbol] | [symbol] | [symbol] | 0 |
| [symbol] | 183 | | | | | | | 0 | 177 | 245 | [symbol] | 1180 | 2222 | [symbol] | [symbol] | 1143 |
| [symbol] | 181 | | | | | | | [symbol] | 208 | 971 | 825 | 914 | 9749 | [symbol] | 728 | 8209 |
| [symbol] | 188 | | | | | | | [symbol] | 278 | 1184 | 1441 | 838 | [symbol] | 4437 | 878 | 2909 |
| [symbol] | 187 | | | | | | | 11137 | 2218 | 0 | 1828 | 1894 | 28341 | 2387 | 1838 | 384 |
| [symbol] | 139 | | | | | | | [symbol] | 943 | 9 | 1799 | 2088 | 1204 | [symbol] | 005 | 14293 |
| [symbol] | 149 | | | | | | | 491 | 517 | 1877 | 991 | [symbol] | 10627 | 8344 | [symbol] | 9 |
| [symbol] | 148 | | | | | | | 9433 | 1256 | 140 | [symbol] | [symbol] | 28534 | 2044 | 1309 | 2239 |
| M14 | 147 | | | | | | | 3031 | 9 | 489 | 2041 | 1883 | 3478 | 1300 | 1035 | 6 |
| [symbol] | 146 | | | | | | | 4423 | 304 | 1299 | 2779 | 2137 | 10063 | [symbol] | 639 | 607 |
| [symbol] | 145 | | | | | | | 2545 | 157 | 726 | 754 | 1215 | 4493 | 2428 | 594 | 430 |
| [symbol] | 144 | | | | | | | [symbol] | 83 | 3004 | 1173 | 721 | 3000 | 1531 | 805 | 2911 |
| [symbol] | 143 | | | | | | | 5224 | 487 | 3887 | 884 | 442 | 3000 | 1020 | 1532 | 11887 |
| [symbol] | 142 | | | | | | | 338 | 8 | 9004 | 2781 | 2618 | 18384 | 2004 | 891 | 3004 |
| [symbol] | 141 | | | | | | | 291 | 218 | 0 | 499 | 0 | 3003 | 379 | 442 | 8 |
| [symbol] | 140 | | | | | | | 2914 | 195 | 1344 | 1741 | 476 | 19872 | 1717 | 919 | 3811 |
| [symbol] | 139 | | | | | | | 4662 | [symbol] | 936 | [symbol] | 288 | [symbol] | 882 | 879 | 1620 |
| [symbol] | 138 | | | | | | | 1288 | 48 | 995 | 2291 | 1148 | 7979 | 2354 | 943 | 2000 |
| [symbol] | 137 | | | | | | | 3599 | 191 | 1883 | [symbol] | 1417 | 11189 | 231 | 1214 | 1103 |
| [symbol] | 136 | | | | | | | 2534 | 52 | 1973 | 1824 | 977 | 20902 | 2457 | 887 | 1006 |
| [symbol] | 135 | | | | | | | 4391 | 443 | 1305 | 1150 | 838 | 1214 | 571 | 830 | 1744 |
| [symbol] | 134 | | | | | | | 4889 | 318 | 1843 | [symbol] | 404 | [symbol] | 2003 | 821 | 1147 |
| [symbol] | 133 | | | | | | | 1724 | 294 | 979 | 1634 | 323 | [symbol] | 244 | 704 | 0 |
| [symbol] | 132 | | | | | | | 2284 | 187 | 1803 | 829 | 742 | 11009 | 2314 | 722 | 0 |
| [symbol] | 131 | | | | | | | 2664 | 29 | 0 | 1239 | 719 | 5239 | 858 | 904 | 0 |
| [symbol] | 130 | | | | | | | 2297 | 486 | 2066 | 1079 | 834 | [symbol] | [symbol] | 952 | 0 |
| [symbol] | 129 | | | | | | | 2213 | 370 | 0 | 719 | [symbol] | 13004 | 2500 | 843 | 0 |
| [symbol] | 128 | | | | | | | 914 | 317 | 8314 | 911 | 640 | 2071 | 7442 | 534 | [symbol] |
| [symbol] | 127 | | | | | | | 1412 | 63 | 621 | 903 | 461 | 3231 | 1331 | [symbol] | 312 |
| [symbol] | 126 | | | | | | | 2183 | 41 | 0 | 1330 | 634 | [symbol] | 3124 | 902 | [symbol] |
| [symbol] | 125 | | | | | | | 3471 | 320 | 0 | 841 | 330 | [symbol] | 1183 | 345 | [symbol] |
| [symbol] | 124 | | | | | | | 5491 | 0 | 1125 | 1997 | 200 | 2993 | [symbol] | 634 | [symbol] |
| [symbol] | 123 | | | | | | | 1951 | 45 | 44 | 234 | 244 | 1934 | 0 | 843 | [symbol] |
| [symbol] | 122 | | | | | | | 2006 | 184 | 809 | 178 | 1623 | 11709 | 11036 | 634 | 827 |
| [symbol] | 121 | | | | | | | 839 | 0 | 0 | 204 | 543 | [symbol] | 305 | 634 | 0 |
| [symbol] | 120 | | | | | | | 5443 | 0 | 1010 | 823 | 1107 | 4271 | 783 | [symbol] | 0 |
| [symbol] | 119 | | | | | | | 1503 | 119 | 1759 | [symbol] | 2414 | [symbol] | [symbol] | 934 | 9425 |
| [symbol] | 118 | | | | | | | 3767 | 0 | 0 | 830 | 252 | 6341 | 1000 | 100 | 200 |
| [symbol] | 117 | | | | | | | 1254 | 204 | 0 | 1027 | 2229 | 11490 | 3863 | 1723 | 857 |
| [symbol] | 116 | | | | | | | 8623 | 44 | 1399 | 2372 | 1624 | 24402 | 2314 | 99 | 1344 |
| [symbol] | 115 | | | | | | | 2000 | 150 | 8853 | 834 | 1592 | 12134 | 1242 | 942 | 0 |
| [symbol] | 114 | | | | | | | 2627 | 457 | 10 | 717 | 367 | [symbol] | 833 | 842 | 1466 |
| [symbol] | 113 | | | | | | | 456 | 0 | 1659 | 873 | 284 | [symbol] | [symbol] | 282 | 1027 |
| [symbol] | 112 | | | | | | | 2617 | 634 | 75 | 1118 | 401 | 1774 | 1809 | 941 | 0 |
| [symbol] | 111 | | | | | | | 1007 | 909 | 1723 | 2304 | 1761 | 20238 | 3231 | 1074 | 751 |
| [symbol] | 110 | | | | | | | 2254 | 204 | 9443 | 883 | 1814 | 11839 | 4509 | 843 | [symbol] |
| [symbol] | 109 | | | | | | | 1204 | 0 | 1175 | 1767 | 1721 | 7279 | [symbol] | [symbol] | 1034 |
| [symbol] | 108 | | | | | | | 2209 | 203 | 729 | 877 | 739 | 8851 | 2516 | 524 | 2200 |
| [symbol] | 107 | | | | | | | 2274 | 449 | 1277 | 934 | 934 | 17829 | 1884 | 476 | 0 |
| [symbol] | 106 | | | | | | | 1144 | 228 | 0 | 495 | 200 | 4322 | 1334 | 722 | 0 |
| [symbol] | 105 | | | | | | | [symbol] | [symbol] | 0 | 3523 | 1047 | 20447 | 209 | 549 | 321 |
| [symbol] | 104 | | | | | | | 2000 | 318 | 0 | [symbol] | [symbol] | [symbol] | 2106 | 412 | 1904 |
| [symbol] | 103 | | | | | | | [symbol] | 126 | 0 | [symbol] | [symbol] | [symbol] | 1852 | 1001 | 0 |
| [symbol] | 102 | | | | | | | [symbol] | 419 | 0 | 1091 | 816 | [symbol] | [symbol] | [symbol] | 3219 |
| [symbol] | 101 | | | | | | | [symbol] | 311 | 0 | 1162 | 911 | 7912 | 446 | 300 | 0 |
| [symbol] | 100 | | | | | | | 212 | 0 | 0 | [symbol] | [symbol] | [symbol] | 0 | [symbol] | 0 |
| [symbol] | 99 | | | | | | | [symbol] | 170 | 77 | 1733 | 915 | [symbol] | [symbol] | [symbol] | [symbol] |
| [symbol] | 98 | | | | | | | [symbol] | 0 | 477 | 422 | 160 | 7004 | 376 | [symbol] | 0 |
| [symbol] | 97 | | | | | | | 3307 | 194 | 0 | [symbol] | [symbol] | [symbol] | 1410 | [symbol] | 401 |
| [symbol] | 44 | | | | | | | 334 | 94 | 14 | [symbol] | 21 | 1718 | [symbol] | 1434 | 0 |
| [symbol] | 47 | | | | | | | [symbol] | 15 | [symbol] | 231 | 0 | [symbol] | [symbol] | 1342 | 0 |
| [symbol] | 44 | | | | | | | 834 | [symbol] | 0 | 183 | 82 | [symbol] | 9715 | 1438 | [symbol] |
| [symbol] | 24 | | | | | | | [symbol] | 737 | [symbol] | 402 | [symbol] | 2737 | [symbol] | 34 | 1742 |
| [symbol] -1 | | | | | | | wt | 0 | 0 | 0 | 8421 | [symbol] | 0 | [symbol] | [symbol] | 0 |
| [symbol] -3 | | | | | | | wt | 0 | 0 | 0 | 4212 | [symbol] | 0 | [symbol] | [symbol] | 0 |
| [symbol] -4 | | | | | | | wt | 0 | 0 | 0 | 8323 | [symbol] | 0 | [symbol] | [symbol] | 0 |
| [symbol] -5 | | | | | | | wt | 0 | 0 | 0 | [symbol] | 210 | 0 | [symbol] | [symbol] | 0 |
| [symbol] -7 | | | | | | | [symbol] | 0 | 0 | 0 | 192 | 118 | 0 | [symbol] | [symbol] | 0 |
| EXVX-1 | | | | | | | [symbol] | 0 | 0 | 0 | 1343 | 0 | 0 | [symbol] | [symbol] | 0 |
| EXVX-4 | | | | | | | [symbol] | 0 | 0 | 0 | [symbol] | 11 | 0 | [symbol] | [symbol] | 0 |
| EXVX-5 | | | | | | | [symbol] | 0 | 0 | 0 | [symbol] | 0 | 0 | [symbol] | [symbol] | 0 |
| EXVX-6 | | | | | | | [symbol] | 0 | 0 | 0 | [symbol] | [symbol] | 0 | [symbol] | [symbol] | 0 |
| EXVX-7 | | | | | | | wt | 0 | 0 | 0 | [symbol] | [symbol] | 0 | [symbol] | [symbol] | 0 |
| MCF-7-1 | | | | | | | wt | 0 | 0 | 0 | 718 | [symbol] | 0 | [symbol] | [symbol] | 0 |
| MCF-7-3 | | | | | | | wt | 0 | 0 | 0 | [symbol] | [symbol] | 0 | [symbol] | [symbol] | 0 |
| MCF-7-4 | | | | | | | wt | 0 | 0 | 0 | 1135 | [symbol] | 0 | [symbol] | [symbol] | 0 |
| MCF-7-6 | | | | | | | wt | 0 | 0 | 0 | [symbol] | [symbol] | 0 | [symbol] | [symbol] | 0 |
| MCF-7-7 | | | | | | | [symbol] | 0 | 0 | 0 | 1337 | [symbol] | 0 | [symbol] | [symbol] | 0 |
| ADR-RES-1 | | | | | | | [symbol] | 0 | 0 | 0 | [symbol] | 0 | 0 | [symbol] | [symbol] | 0 |
| ADR-RES-3 | | | | | | | [symbol] | 0 | 0 | 0 | 920 | [symbol] | 0 | [symbol] | [symbol] | 0 |
| ADR-RES-4 | | | | | | | [symbol] | 0 | 0 | 0 | [symbol] | 0 | 0 | [symbol] | [symbol] | 0 |
| ADR-RES-6 | | | | | | | [symbol] | 0 | 0 | 0 | 472 | 112 | 0 | [symbol] | [symbol] | 0 |
| ADR-RES-7 | | | | | | | wt | 0 | 0 | 0 | [symbol] | 0 | 0 | [symbol] | [symbol] | 0 |
| WI 30-1 | | | | | | | wt | 0 | 0 | 0 | 0 | 222 | 0 | [symbol] | [symbol] | 0 |
| WI 30-3 | | | | | | | wt | 0 | 0 | 0 | [symbol] | 172 | 0 | [symbol] | [symbol] | 0 |
| WI 30-4 | | | | | | | wt | 0 | 0 | 0 | 751 | [symbol] | 0 | [symbol] | [symbol] | 0 |
| WI 30-6 | | | | | | | wt | 0 | 0 | 0 | [symbol] | [symbol] | 0 | [symbol] | [symbol] | 0 |
| WI 30-7 | | | | | | | [symbol] | 0 | 0 | 0 | [symbol] | 0 | 0 | [symbol] | [symbol] | 0 |
| [symbol] | | | | | | | [symbol] | 0 | 0 | 0 | [symbol] | [symbol] | 0 | [symbol] | [symbol] | 0 |
| [symbol] | | | | | | | [symbol] | 0 | 0 | 0 | [symbol] | [symbol] | 0 | [symbol] | [symbol] | 0 |
| [symbol] | | | | | | | [symbol] | 0 | 0 | 0 | [symbol] | [symbol] | 0 | [symbol] | [symbol] | 0 |
| [symbol] | | | | | | | [symbol] | 0 | 0 | 0 | [symbol] | [symbol] | 0 | [symbol] | [symbol] | 0 |
| [symbol] | | | | | | | [symbol] | 0 | 0 | 0 | [symbol] | [symbol] | 0 | [symbol] | [symbol] | 0 |
| [symbol] -1 | | | | | | | [symbol] | 0 | 0 | 0 | 0 | 0 | 0 | [symbol] | [symbol] | 0 |
| [symbol] -3 | | | | | | | [symbol] | 0 | 0 | 0 | 0 | 0 | 0 | [symbol] | [symbol] | 0 |
| [symbol] -4 | | | | | | | [symbol] | 0 | 0 | 0 | 2070 | [symbol] | 0 | [symbol] | [symbol] | 0 |
| [symbol] -5 | | | | | | | [symbol] | 0 | 0 | 0 | 1400 | [symbol] | 0 | [symbol] | [symbol] | 0 |
| [symbol] -7 | | | | | | | wt | 0 | 0 | 0 | 0 | 0 | 0 | [symbol] | [symbol] | 0 |
| [symbol] -3 | | | | | | | [symbol] | 0 | 0 | 0 | 4710 | 141 | 0 | [symbol] | [symbol] | 0 |
| [symbol] -2 | | | | | | | wt | 0 | 0 | 0 | 2003 | [symbol] | 0 | [symbol] | [symbol] | 0 |
| HCT-116-1 | | | | | | | wt | 0 | 0 | 0 | [symbol] | 143 | 0 | [symbol] | [symbol] | 0 |
| HCT-116-2 | | | | | | | [symbol] | 0 | 0 | 0 | [symbol] | 44 | 0 | [symbol] | [symbol] | 0 |
| [symbol] -2 | | | | | | | wt | 0 | 0 | 0 | [symbol] | [symbol] | 0 | [symbol] | [symbol] | 0 |
| [symbol] -1 | | | | | | | wt | 0 | 0 | 0 | [symbol] | [symbol] | 0 | [symbol] | [symbol] | 0 |
| [symbol] -2 | | | | | | | [symbol] | 0 | 0 | 0 | [symbol] | 10 | 0 | [symbol] | [symbol] | 0 |
| [symbol] -1 | | | | | | | [symbol] | 0 | 0 | 0 | 317 | 2004 | 0 | [symbol] | [symbol] | 0 |
| [symbol] -2 | | | | | | | wt | 0 | 0 | 0 | 850 | [symbol] | 0 | [symbol] | [symbol] | 0 |
| OVCAR-4-1 | | | | | | | wt | 0 | 0 | 0 | 89 | [symbol] | 0 | [symbol] | [symbol] | 0 |
| OVCAR-4-2 | | | | | | | [symbol] | 0 | 0 | 0 | 1843 | [symbol] | 0 | [symbol] | [symbol] | 0 |
| OVCAR-4-1 | | | | | | | [symbol] | 0 | 0 | 0 | [symbol] | [symbol] | 0 | [symbol] | [symbol] | 0 |
| OVCAR-4-2 | | | | | | | wt | 0 | 0 | 0 | 10 | [symbol] | 0 | [symbol] | [symbol] | 0 |
| [symbol] -2 | | | | | | | [symbol] | 0 | 0 | 0 | 1433 | [symbol] | 0 | [symbol] | [symbol] | 0 |
| [symbol] -2 | | | | | | | [symbol] | 0 | 0 | 0 | 731 | [symbol] | 0 | [symbol] | [symbol] | 0 |
| [symbol] -2 | | | | | | | [symbol] | 0 | 0 | 0 | 0 | [symbol] | 0 | [symbol] | [symbol] | 0 |
| [symbol] -1 | | | | | | | [symbol] | 0 | 0 | 0 | 0 | [symbol] | 0 | [symbol] | [symbol] | 0 |
| [symbol] -2 | | | | | | | [symbol] | 0 | 0 | 0 | [symbol] | [symbol] | 0 | [symbol] | [symbol] | 0 |
| [symbol] -2 | | | | | | | [symbol] | 0 | 0 | 0 | [symbol] | [symbol] | 0 | [symbol] | [symbol] | 0 |
| [symbol] -1 | | | | | | | [symbol] | 0 | 0 | 0 | [symbol] | 0 | 0 | [symbol] | [symbol] | 0 |
| [symbol] -2 | | | | | | | [symbol] | 0 | 0 | 0 | 1155 | 1 | 0 | [symbol] | [symbol] | 0 |
| [symbol] -1 | | | | | | | [symbol] | 0 | 0 | 0 | [symbol] | [symbol] | 0 | [symbol] | [symbol] | 0 |
| [symbol] -2 | | | | | | | wt | 0 | 0 | 0 | 0 | [symbol] | 0 | [symbol] | [symbol] | 0 |
| [symbol] -1 | | | | | | | wt | 0 | 0 | 0 | [symbol] | [symbol] | 0 | [symbol] | [symbol] | 0 |
| [symbol] -2 | | | | | | | wt | 0 | 0 | 0 | [symbol] | 0 | 0 | [symbol] | [symbol] | 0 |
| WI 30-2 | | | | | | | | 0 | 0 | 0 | [symbol] | 0 | 0 | [symbol] | [symbol] | 0 |
| [symbol] -1 | | | | | | | | 0 | 0 | 0 | [symbol] | [symbol] | 0 | [symbol] | [symbol] | 0 |
| [symbol] -2 | | | | | | | | 0 | 0 | 0 | [symbol] | [symbol] | 0 | [symbol] | [symbol] | 0 |
| [symbol] -3 | | | | | | | | 0 | 0 | 0 | [symbol] | [symbol] | 0 | [symbol] | [symbol] | 0 |
| [symbol] -4 | | | | | | | | 0 | 0 | 0 | 0 | 143 | 0 | [symbol] | [symbol] | 0 |
| [symbol] -5 | | | | | | | | 0 | 0 | 0 | 0 | [symbol] | 0 | [symbol] | [symbol] | 0 |
| [symbol] -6 | | | | | | | | 0 | 0 | 0 | [symbol] | 1 | 0 | [symbol] | [symbol] | 0 |
| [symbol] -7 | | | | | | | | 0 | 0 | 0 | [symbol] | [symbol] | 0 | [symbol] | [symbol] | 0 |
| [symbol] -8 | | | | | | | | 0 | 0 | 0 | 0 | [symbol] | 0 | [symbol] | 1234 | 0 |
| [symbol] -7 | | | | | | | | 0 | 0 | 0 | 4153 | 258 | [symbol] | 11 [symbol] | [symbol] | 0 |
| [symbol] -8 | | | | | | | | 0 | 0 | 0 | 0 | 72 | 0 | 1134 | [symbol] | 0 |
| [symbol] | | | | | | | | 0 | 0 | 0 | 352 | 17 | 0 | [symbol] | [symbol] | 0 |
| [symbol] 11 | | | | | | | | 0 | 0 | 0 | 2910 | 477 | 0 | 1191 | 732 | 0 |
| [symbol] 12 | | | | | | | | 0 | 0 | 0 | 0 | [symbol] | 0 | [symbol] | [symbol] | 0 |
| [symbol] | | | | | | | | 0 | 0 | 0 | 11437 | 102 | 0 | 910 | 582 | 0 |
| [symbol] 1 | | | | | | | | 0 | 0 | 0 | 0 | [symbol] | 0 | [symbol] | 434 | 0 |
| [symbol] 2 | | | | | | | | 0 | 0 | 0 | 282 | 0 | 0 | [symbol] | [symbol] | 0 |
| [symbol] 3 | | | | | | | | 0 | 0 | 0 | 10 [symbol] | [symbol] | [symbol] | 337 | [symbol] | 0 |
| [symbol] 4 | | | | | | | | 0 | 0 | 0 | 3675 | 67 | 0 | [symbol] | [symbol] | 0 |
| [symbol] 5 | | | | | | | | 0 | 0 | 0 | 217 | 72 | 0 | [symbol] | [symbol] | 0 |
| [symbol] 6 | | | | | | | [symbol] | 0 | 0 | 0 | 0 | 40 | 0 | 62 | [symbol] | 0 |
| [symbol] -6 | | | | | | | [symbol] | 0 | 0 | 0 | [symbol] | 79 | 0 | [symbol] | [symbol] | 0 |
| EKYX-6 | | | | | | | [symbol] | 0 | 0 | 0 | [symbol] | [symbol] | 0 | [symbol] | [symbol] | 0 |
| HCT-114-7 | | | | | | | [symbol] | 0 | 0 | 0 | 0 | [symbol] | 0 | [symbol] | [symbol] | 0 |
| HCT-116-8 | | | | | | | [symbol] | 0 | 0 | 0 | [symbol] | 122 | 0 | 175 | 875 | 0 |
| HT29-1 | | | | | | | [symbol] | 0 | 0 | 0 | 3521 | 0 | 0 | [symbol] | [symbol] | 0 |
| HT29-7 | | | | | | | [symbol] | 0 | 0 | 0 | 3147 | 20 | 0 | [symbol] | [symbol] | 0 |
| HT29-8 | | | | | | | [symbol] | 0 | 0 | 0 | 467 | 0 | 0 | 200 | [symbol] | 0 |
| [symbol] -7 | | | | | | | [symbol] | 0 | 0 | 0 | 375 | [symbol] | 0 | 21 | [symbol] | 0 |
| [symbol] -8 | | | | | | | [symbol] | 0 | 0 | 0 | 0 | [symbol] | 0 | 21 | [symbol] | 0 |
| [symbol] -7 | | | | | | | [symbol] | 0 | 0 | 0 | 440 | [symbol] | 0 | [symbol] | [symbol] | 0 |
| [symbol] -8 | | | | | | | [symbol] | 0 | 0 | 0 | 0 | [symbol] | 0 | [symbol] | [symbol] | 0 |
| OVCAR4-7 | | | | | | | [symbol] | 0 | 0 | 0 | 1305 | 423 | 0 | 0 | 934 | 0 |
| OVCAR4-8 | | | | | | | [symbol] | 0 | 0 | 0 | 127 | [symbol] | 0 | 2777 | [symbol] | 0 |
| OVCAR4-7 | | | | | | | [symbol] | 0 | 0 | 0 | 325 | 0 | 0 | [symbol] | [symbol] | 0 |
| OVCAR4-8 | | | | | | | [symbol] | 0 | 0 | 0 | 0 | 315 | 0 | [symbol] | [symbol] | 0 |
| MCF-8-8 | | | | | | | [symbol] | 0 | 0 | 0 | 740 | [symbol] | 0 | [symbol] | [symbol] | 0 |
| [symbol] | | | | | | | [symbol] | 0 | 0 | 0 | 3013 | 0 | 0 | [symbol] | [symbol] | 0 |
| HeLA-8 | | | | | | | [symbol] | 0 | 0 | 0 | 2243 | 117 | 0 | [symbol] | [symbol] | 0 |
| SW480-7 | | | | | | | [symbol] | 0 | 0 | 0 | 1081 | 452 | 0 | 0 | 1024 | 0 |
| SW480-8 | | | | | | | [symbol] | 0 | 0 | 0 | 7328 | 417 | 0 | 302 | 712 | 0 |
| H1290-6 | | | | | | | [symbol] | 0 | 0 | 0 | 2343 | 0 | 0 | 0 | 737 | 0 |
| [symbol] -7 | | | | | | | [symbol] | 0 | 0 | 0 | 3128 | 0 | 0 | [symbol] | [symbol] | 0 |
| [symbol] -8 | | | | | | | [symbol] | 0 | 0 | 0 | 1013 | 0 | 0 | [symbol] | [symbol] | 0 |
| [symbol] -7 | | | | | | | [symbol] | 0 | 0 | 0 | 2134 | 0 | 0 | 13 | 951 | 0 |
| [symbol] -8 | | | | | | | [symbol] | 0 | 0 | 0 | 0 | [symbol] | 0 | [symbol] | [symbol] | 0 |
| [symbol] -7 | | | | | | | [symbol] | 0 | 0 | 0 | 4024 | [symbol] | 0 | 171 | 615 | 0 |
| [symbol] -8 | | | | | | | [symbol] | 0 | 0 | 0 | 4437 | 0 | 0 | 301 | [symbol] | 0 |
| [symbol] | | | | | | | | 0 | 2 [symbol] | 0 | 47 | [symbol] | [symbol] | [symbol] | [symbol] | 0 |
| [symbol] RNA | | | | | | | | 0 | [symbol] | 0 | 304 | 1454 | 1335 | 1421 | [symbol] | 0 |
| CRL 1372 3/17/ [symbol] | | | | | | | | 0 | 104 | 154 | 32 | 0 | 42 | 445 | 336 | 1013 |
| [symbol] | | | | | | 54 | | 274 | 434 | 0 | 25 | 153 | 572 | 2372 | 1228 | [symbol] |
| HT368 | | | | | | | | 1326 | 1327 | 0 | 217 | 70 | 5103 | 0 | [symbol] | 0 |
| HT378 | | | | | | | | 20 | 104 | 0 | 163 | 65 | 723 | 0 | [symbol] | 0 |
| HT386 | | | | | | | | [symbol] | [symbol] | 0 | [symbol] | [symbol] | [symbol] | 375 | 1937 | [symbol] |
| HT308 | | | | | | | | 0 | 234 | 0 | 449 | 0 | 494 | 95 | 2033 | [symbol] |
| [symbol] -3 | | | | | | 173 | | 0 | 0 | [symbol] | 34 | 115 | 0 | 0 | [symbol] | 0 |
| [symbol] -5 | | | | | | 176 | | 0 | 335 | 790 | 0 | 0 | 10 | 101 | 345 | 0 |
| [symbol] | | | | | | 177 | | 576 | 345 | 241 | 104 | 0 | [symbol] | 115 | [symbol] | 0 |
| [symbol] | | | | | | | | 0 | 1129 | 325 | 0 | 0 | [symbol] | [symbol] | [symbol] | 0 |
| [symbol] -10 | | | | | | 217 | | 0 | 0 | 14 | 0 | 16 | 0 | 1514 | [symbol] | 0 |
| HT [symbol] 10 | | | | | | | | 0 | [symbol] | 0 | 242 | 0 | 443 | [symbol] | 1304 | 0 |
| [symbol] | | | | | | | | 0 | 362 | [symbol] | 91 | [symbol] | 0 | [symbol] | [symbol] | 0 |
| [symbol] | | | | | | | | 0 | 182 | [symbol] | 187 | [symbol] | [symbol] | 0 | 9021 | 0 |
| [symbol] | | | | | | | | 52 | 0 | 0 | 492 | [symbol] | 1535 | 0 | [symbol] | 0 |
| [symbol] | | | | | | | | 1004 | 70 | 0 | 572 | [symbol] | [symbol] | 211 | [symbol] | [symbol] |
| [symbol] | | | | | | | | 1104 | 0 | 0 | 779 | 1305 | [symbol] | [symbol] | 1231 | [symbol] |
| HCT-116-3 | | | | | | | [symbol] | 0 | 0 | 0 | [symbol] | [symbol] | 0 | [symbol] | [symbol] | 0 |
| HCT-116-4 | | | | | | | [symbol] | 0 | 0 | 0 | 0 | [symbol] | 0 | [symbol] | [symbol] | 0 |
| HCT-116-5 | | | | | | | [symbol] | 0 | 0 | 0 | 277 | 14 | 0 | [symbol] | 414 | 0 |
| HCT-116-6 | | | | | | | [symbol] | 0 | 0 | 0 | [symbol] | 0 | 0 | [symbol] | [symbol] | 0 |
| [symbol] -6 | | | | | | | [symbol] | 0 | 0 | 0 | 4346 | 0 | 0 | [symbol] | [symbol] | 0 |
| HT29-3 | | | | | | | [symbol] | 0 | 0 | 0 | 3771 | 100 | 0 | [symbol] | [symbol] | 0 |
| [symbol] -4 | | | | | | | [symbol] | 0 | 0 | 0 | 0 | 0 | 0 | 175 | [symbol] | 0 |
| HT29-4 | | | | | | | [symbol] | 0 | 0 | 0 | 0 | 0 | 0 | [symbol] | [symbol] | 0 |
| HT29-5 | | | | | | | [symbol] | 0 | 0 | 0 | [symbol] | [symbol] | 0 | 234 | 211 | 0 |
| HT29-6 | | | | | | | [symbol] | 0 | 0 | 0 | 0 | [symbol] | 0 | 0 | 910 | 0 |
| OVCAR4-3 | | | | | | | [symbol] | 0 | 0 | 0 | [symbol] | 42 | 0 | 430 | [symbol] | 0 |
| OVCAR4-4 | | | | | | | [symbol] | 0 | 0 | 0 | [symbol] | [symbol] | 0 | 0 | [symbol] | 0 |
| OVCAR4-5 | | | | | | | [symbol] | 0 | 0 | 0 | [symbol] | 734 | 0 | 971 | [symbol] | 0 |
| OVCAR4-6 | | | | | | | [symbol] | 0 | 0 | 0 | [symbol] | [symbol] | 0 | [symbol] | 753 | 0 |
| [symbol] -3 | | | | | | | [symbol] | 0 | 0 | 0 | 0 | 131 | 0 | 315 | [symbol] | 0 |
| [symbol] -4 | | | | | | | [symbol] | 0 | 0 | 0 | 0 | [symbol] | 0 | [symbol] | 524 | 0 |
| [symbol] -5 | | | | | | | [symbol] | 0 | 0 | 0 | [symbol] | 75 | 0 | [symbol] | [symbol] | 0 |
| [symbol] -6 | | | | | | | [symbol] | 0 | 0 | 0 | 617 | 0 | 0 | 0 | 1047 | 0 |
| OVCAR5-3 | | | | | | | [symbol] | 0 | 0 | 0 | 2413 | 62 | 0 | [symbol] | [symbol] | 0 |
| OVCAR5-4 | | | | | | | [symbol] | 0 | 0 | 0 | [symbol] | [symbol] | 0 | 72 | [symbol] | 0 |
| OVCAR4-5 | | | | | | | [symbol] | 0 | 0 | 0 | 444 | 0 | 0 | 0 | 307 | 0 |
| [symbol] -6 | | | | | | | [symbol] | 0 | 0 | 0 | [symbol] | 175 | 0 | 0 | 723 | 0 |
| [symbol] | | | | | | | [symbol] | 0 | 0 | 0 | 2112 | 25 | 0 | 543 | 1131 | 0 |
| HeLa-6 | | | | | | | [symbol] | 0 | 0 | 0 | 0 | [symbol] | 0 | 0 | [symbol] | 0 |
| [symbol] | | | | | | | [symbol] | 0 | 0 | 0 | 358 | 1111 | 0 | [symbol] | 771 | 0 |
| SW480-3 | | | | | | | [symbol] | 0 | 0 | 0 | 226 | 200 | 0 | [symbol] | 641 | 0 |
| SW480-4 | | | | | | | [symbol] | 0 | 0 | 0 | 3044 | 90 | 0 | 0 | [symbol] | 0 |
| SW480-5 | | | | | | | [symbol] | 0 | 0 | 0 | 0 | 577 | 0 | 370 | 1148 | 0 |
| SW480-6 | | | | | | | [symbol] | 0 | 0 | 0 | 240 | 490 | 0 | 1271 | 1247 | 0 |
| C33A-3 | | | | | | | [symbol] | 0 | 0 | 0 | 0 | [symbol] | 0 | 195 | 1104 | 0 |
| C33A-4 | | | | | | | [symbol] | 0 | 0 | 0 | 0 | 0 | 0 | 0 | 521 | 0 |
| C33A-5 | | | | | | | [symbol] | 0 | 0 | 0 | 211 | 0 | 0 | [symbol] | 1143 | 0 |
| C334-6 | | | | | | | [symbol] | 0 | 0 | 0 | [symbol] | 313 | 0 | [symbol] | [symbol] | 0 |
| He [symbol] -6 | | | | | | | [symbol] | 0 | 0 | 0 | 0 | [symbol] | 0 | 0 | [symbol] | 0 |
| [symbol] -3 | | | | | | | [symbol] | 0 | 0 | 0 | [symbol] | [symbol] | 0 | 201 | 724 | 0 |
| [symbol] -4 | | | | | | | [symbol] | 0 | 0 | 0 | 2742 | 15 | 0 | [symbol] | [symbol] | 0 |
| [symbol] -5 | | | | | | | [symbol] | 0 | 0 | 0 | 1376 | 218 | 0 | [symbol] | 715 | 0 |
| [symbol] -6 | | | | | | | [symbol] | 0 | 0 | 0 | [symbol] | 0 | 0 | 1097 | [symbol] | 0 |
| [symbol] -6 | | | | | | | [symbol] | 0 | 0 | 0 | [symbol] | 0 | 0 | 0 | 734 | 0 |
| [symbol] -3 | | | | | | | [symbol] | 0 | 0 | 0 | 4744 | 204 | 0 | 715 | [symbol] | 0 |
| [symbol] -4 | | | | | | | [symbol] | 0 | 0 | 0 | 1334 | [symbol] | 0 | [symbol] | [symbol] | 0 |
| SF-286-3 | | | | | | | [symbol] | 0 | 0 | 0 | 740 | 1244 | 0 | 0 | [symbol] | 0 |
| SF-286-4 | | | | | | | [symbol] | 0 | 0 | 0 | 5402 | [symbol] | 0 | 751 | 721 | 0 |
| SF-286-6 | | | | | | | [symbol] | 0 | 0 | 0 | [symbol] | [symbol] | 0 | 0 | [symbol] | 0 |
| SF-286-5 | | | | | | | [symbol] | 0 | 0 | 0 | [symbol] | 0 | 0 | 10 | 790 | 0 |
| [symbol] -13 | | | | | | | | 0 | 0 | 0 | [symbol] | 47 | 0 | [symbol] | [symbol] | 0 |
| [symbol] -20 | | | | | | | | 0 | 0 | 0 | [symbol] | 0 | 0 | 0 | [symbol] | 0 |
| [symbol] -21 | | | | | | | | 0 | 0 | 0 | [symbol] | 70 | 0 | [symbol] | 5311 | 0 |
| [symbol] -22 | | | | | | | | 0 | 0 | 0 | [symbol] | 234 | 0 | 227 | [symbol] | 0 |
| [symbol] -5 | | | | | | | [symbol] | 0 | 0 | 0 | 0 | 95 | 0 | 312 | 741 | 0 |
| [symbol] -10 | | | | | | | | 0 | 0 | 0 | 15 | 3 | 0 | [symbol] | [symbol] | 0 |
| [symbol] -11 | | | | | | | | 0 | 0 | 0 | 0 | [symbol] | 0 | 1 | [symbol] | 0 |
| [symbol] -12 | | | | | | | | 0 | 0 | 0 | 0 | [symbol] | 0 | 2134 | 901 | 0 |
| [symbol] -13 | | | | | | | | 0 | 0 | 0 | 0 | 1044 | 0 | [symbol] | [symbol] | 0 |
| [symbol] -14 | | | | | | | | 0 | 0 | 0 | 0 | 207 | 0 | 921 | [symbol] | 0 |
| [symbol] -15 | | | | | | | | 0 | 0 | 0 | 0 | [symbol] | 0 | [symbol] | [symbol] | 0 |
| [symbol] -16 | | | | | | | | 0 | 0 | 0 | 0 | 2 | 0 | 0 | [symbol] | 0 |
| [symbol] -17 | | | | | | | | 0 | 0 | 0 | 0 | 0 | 0 | 0 | [symbol] | 0 |
| [symbol] -18 | | | | | | | | 0 | 0 | 0 | 567 | 33 | 0 | 1234 | [symbol] | 0 |
| [symbol] -19 | | | | | | | | 0 | 0 | 0 | 4 | 55 | 0 | [symbol] | [symbol] | 0 |

| T [symbol] | T [symbol] | [symbol] | T [symbol] | T [symbol] | [symbol] | B [symbol] | p53 | sEQ 110 [symbol] |
|---|---|---|---|---|---|---|---|---|
| [symbol] | | 1 | | | | | | [symbol] |
| [symbol] | | 2 | | | | | | 834 |
| [symbol] | | 3 | | | | | | 822 |
| [symbol] | | 4 | | | | | | 0 |
| [symbol] | | 5 | | | | | | [symbol] |
| [symbol] | | 6 | | | | | | [symbol] |
| [symbol] | | 7 | | | | | | [symbol] |
| [symbol] | | 8 | | | | | | [symbol] |
| [symbol] | | 9 | | | | | | 2327 |
| [symbol] | | 10 | | | | | | 2719 |
| [symbol] | | 11 | | | | | | [symbol] |
| [symbol] | | 12 | | | | | | [symbol] |
| [symbol] | | 13 | | | | | | [symbol] |
| [symbol] | | 14 | | | | | | [symbol] |
| [symbol] | | 15 | | | | | | 410 |
| [symbol] | | 16 | | | | | | 0 |
| [symbol] | | 17 | | | | | | [symbol] |
| [symbol] | | 18 | | | | | | [symbol] |
| [symbol] | | 19 | | | | | | 282 |
| [symbol] | | 20 | | | | | | 290 |
| [symbol] | | 21 | | | | | | 51 |
| [symbol] | | 22 | | | | | | [symbol] |
| [symbol] | | 23 | | | | | | [symbol] |
| [symbol] | | 24 | | | | | | [symbol] |
| [symbol] | | 25 | | | | | | [symbol] |
| [symbol] | | 27 | | | | | | 141 |
| [symbol] | | 28 | | | | 28 | | 332 |
| [symbol] | | 29 | | | | | | 0 |
| RPTEC | | 30 | | | | 30 | | [symbol] |
| [symbol] | | 31 | | | | | | [symbol] |
| MMEC | | 32 | | | | | | [symbol] |
| [symbol] | | 33 | | | | | | [symbol] |
| [symbol] | | 34 | | | | | | [symbol] |
| [symbol] | | 35 | | | | | | 0 |
| [symbol] | | 36 | | | | | | 17 [symbol] |
| [symbol] | | 37 | | | | | | 71 |
| [symbol] | | 38 | | | | | | 1004 |
| [symbol] | | 39 | | | | | | 102 |
| [symbol] | | 40 | | | | | | 14 [symbol] |
| [symbol] | | 41 | | | | | | 120 |
| [symbol] | | 42 | | | | | | [symbol] 37 |
| [symbol] | | 43 | | | | | | 140 |
| [symbol] | | 44 | | | | | | 0 |
| [symbol] | | | | | 305 | | | 0 |
| [symbol] | | | | | [symbol] | | | 0 |
| [symbol] | | | | | 341 | | | 0 |
| [symbol] | | | | | 358 | 358 | | [symbol] |
| [symbol] | | | | | 364 | 354 | | [symbol] |
| [symbol] | | | | | 344 | | | [symbol] |
| [symbol] | | | | | 342 | | | 0 |
| RPTEC | | | | | 334 | 334 | | 0 |
| [symbol] | | | | | 322 | | | [symbol] |
| [symbol] | | | | | 330 | | | 141 |
| [symbol] | | | | | 329 | | | 70 |
| [symbol] | | | | | 327 | | | [symbol] |
| [symbol] | | | | | [symbol] | | | [symbol] |
| [symbol] | | | | | 321 | | | 0 |
| [symbol] | | | | | 320 | | | 0 |
| [symbol] | | | | | [symbol] | | | 140 |
| [symbol] | | | | | [symbol] | | | 203 |
| [symbol] | | | | | 314 | | | 173 |
| [symbol] | | | | | 311 | | | 0 |
| [symbol] | | | | | [symbol] | | | [symbol] |
| [symbol] | | | | | 307 | | | [symbol] |
| [symbol] | | | | | 305 | | | 0 |
| [symbol] | | | | | 303 | | | 0 |
| [symbol] | | | | | 302 | | | 307 |
| [symbol] | | | | | 290 | | | 18 |
| [symbol] | | | | | 291 | | | [symbol] |
| [symbol] | | | | | [symbol] | | | 21 |
| [symbol] | | | | | [symbol] | | | 111 |
| [symbol] | | | | | [symbol] | | | 0 |
| [symbol] | | | | | [symbol] | | | 0 |
| [symbol] | | | | | 279 | | | [symbol] |
| [symbol] | | | | | 277 | | | 134 |
| HPAEC | | | | | 275 | 275 | | 0 |
| [symbol] | | | | | [symbol] | | | 0 |
| [symbol] | | | | | [symbol] | | | [symbol] |
| [symbol] | | | | | 230 | 230 | | 331 |
| [symbol] | | | | | 233 | 233 | | 222 |
| MT373 [symbol] | | | | | 234 | | | 0 |
| [symbol] | | | | | 233 | 233 | | 356 |
| [symbol] | | | | | 221 | [symbol] | | [symbol] |
| [symbol] | | | | | 229 | 229 | | [symbol] |
| [symbol] | | | | | 227 | 227 | | 442 |
| [symbol] | | | | | 222 | | | [symbol] |
| [symbol] | | | | | 218 | | | 0 |
| [symbol] | | | | | 214 | | | [symbol] |
| [symbol] | | | | | 213 | | | 0 |
| [symbol] | | | | | 212 | | | [symbol] |
| HCAEC | | | | | 211 | 211 | | 0 |
| [symbol] | | | | | 210 | | | 0 |
| MMEC | | | | | 209 | | | 0 |
| [symbol] | | | | | [symbol] | | | [symbol] |
| [symbol] | | | | | [symbol] | | | 0 |
| [symbol] | | | | | 201 | | | 0 |
| [symbol] | | | | | 190 | | | 0 |
| [symbol] | | | | | [symbol] | | | 0 |
| [symbol] | | | | | [symbol] | | | [symbol] |
| [symbol] | | | | | [symbol] | | | 0 |
| [symbol] | | | | | [symbol] | | | 0 |
| [symbol] | | | | | [symbol] | | | 0 |
| [symbol] | | | | | [symbol] | | | 0 |
| [symbol] | | | | | [symbol] | | | 0 |
| [symbol] | | | | | [symbol] | | | 0 |
| [symbol] | | | | | [symbol] | | | 0 |
| [symbol] | | | | | 51 | | | [symbol] |
| [symbol] | | | | | 49 | | | 0 |
| MELA [symbol] | | | | 79 | | | | 0 |
| MELA [symbol] | | | | 81 | | | | [symbol] |
| MELA [symbol] | | | | 83 | | | | [symbol] |
| MELA [symbol] | | | | [symbol] | | | | [symbol] |
| MELA [symbol] | | | | [symbol] | | | | 87 |
| MELA [symbol] | | | | [symbol] | | | | [symbol] |
| MELA [symbol] | | | | [symbol] | | | | 0 |
| [symbol] | | | | [symbol] | | | | 91 |
| [symbol] | | | | [symbol] | | | | 0 |
| [symbol] | | | | [symbol] | | | | 120 |
| [symbol] | | | | 140 | | | | [symbol] |
| [symbol] | | | | 150 | | | | [symbol] |
| [symbol] | | | | 152 | | | | [symbol] |
| [symbol] | | | | 154 | | | | 0 |
| SF [symbol] | | | | [symbol] | | | | 137 |
| SF [symbol] | | | | 15 [symbol] | | | | 0 |
| CC [symbol] | | | | 1 [symbol] | | | | 185 |
| OU-145 | | | | 1 [symbol] 2 | | | | 0 |
| MCT [symbol] | | | | 1 [symbol] 4 | | | | 0 |
| [symbol] | | | | [symbol] | | | | 4 |
| 766-4 | | | | [symbol] | | | | 0 |
| T-47D | | | | [symbol] | | | | 0 |
| [symbol] | | | | 177 | | | | [symbol] |
| CPI 1441 [symbol] | | | | 181 | | | | 0 |
| 79T [symbol] | | | | 183 | | | | 100 |
| [symbol] A* | | | | 184 | | | | 47 |
| [symbol] poly A* | | | | 114 | | | | 0 |
| AC [symbol] | | | | 114 | | | | 62 |
| [symbol] CC-42 | | | | 200 | | | | 0 |
| MCF-7 [symbol] | | | | 222 | | | | [symbol] |
| UTC ( [symbol] ) [symbol] | | | | 234 | | | | 0 |
| [symbol] poly | | | | [symbol] | | | | 34 |
| 444 [symbol] | | | | 200 | | | | 230 |
| CCI, T37 RMA 37 [symbol] | | | | 218 | | | | 0 |
| [symbol] 200 10% FBS | | | | 218 | | | | 4 |
| [symbol] | | | | 239 | | | | 242 |
| [symbol] -1 | | | | 221 | | | | [symbol] |
| [symbol] -2 | | | | 223 | | | | 79 |
| [symbol] -4 | | | | 224 | | | | 0 |
| [symbol] | | | | 241 | | | | 0 |
| [symbol] T-4 | | | | 242 | | | | 0 |
| [symbol] | | | | 243 | | | | 0 |
| [symbol] | | | | 244 | | | | 0 |
| [symbol] | | | | 245 | | | | 0 |
| [symbol] | | | | 246 | | | | [symbol] |
| [symbol] TCC | | | | 247 | | | | 241 |
| SR | | | | 248 | | | | 0 |
| OVCAR-3 | | | | 249 | | | | 85 |
| HCT-15 | | | | 250 | | | | 0 |
| OVCAR-4 | | | | 251 | | | | 0 |
| UO-31 | | | | 252 | | | | 0 |
| OVCAR-4 | | | | 253 | | | | 248 |
| [symbol] 12C | | | | 254 | | | | 0 |
| OVCAR-5 | | | | 255 | | | | 0 |
| LCD [symbol] | | | | 256 | | | | 0 |
| [symbol] | | | | 257 | | | | 0 |
| [symbol] -2 | | | | 258 | | | | 153 |
| [symbol] -3 | | | | 259 | | | | 0 |
| [symbol] -4 | | | | 260 | | | | 0 |
| SF- [symbol] | | | | 261 | | | | 0 |
| [symbol] | | | | 262 | | | | 0 |
| [symbol] | | | | 263 | | | | 22 |
| UACC-257 | | | | 264 | | | | 33 |
| [symbol] 14 | | | | 265 | | | | 0 |
| MCF7 | | | | 267 | | | | 43 |
| MCA-A [symbol] -435 | | | | [symbol] | | | | 100 |
| [symbol] T270 | | | | 270 | | | | 0 |
| MCA-4 | | | | 271 | | | | 0 |
| Y79 poly A* | | | | 273 | | | | 0 |
| IO [symbol] poly A* | | | | [symbol] | | | | 34 |
| HT836 [symbol] TPA [symbol] | | | | 300 | | | | 147 |
| [symbol] | | | | 313 | | | | 83 |
| [symbol] | | | | 322 | | | | 0 |
| 44T347 | | | | 333 | | | | 0 |
| [symbol] | | | | 334 | | | | 127 |
| [symbol] | | | | 234 | | | | 0 |
| [symbol] | | | | 337 | | | | 0 |
| [symbol] | | | | [symbol] | | | | 61 |
| U29 | | | | 330 | | | | 8 |
| PT [symbol] A* | | | | 300 | | | | 0 |
| PC-3 | | | | 341 | | | | 0 |
| MCC-7000 | | | | 343 | | | | 0 |
| SW-420 | | | | 345 | | | | 0 |
| [symbol] TT82 | | | | 346 | | | | 148 |
| CCLO 293 | | | | 347 | | | | 0 |
| HT294 | | | | 348 | | | | 0 |
| [symbol] -12 | | | | 34349 | | | | 0 |
| XT151 | | | | 350 | | | | 20 |
| AA95 | | | | 351 | | | | 0 |
| HT [symbol] | | | | 352 | | | | 140 |
| [symbol] | | | | 353 | | | | 0 |
| TK-19 | | | | 355 | | | | 363 |
| [symbol] | | | | 357 | | | | 241 |
| [symbol] 578T | | | | 350 | | | | 0 |
| HT13 | | | 50 | | | | | 312 |
| HT [symbol] | | | 52 | | | | | 0 |
| HT130 | | | 54 | | | | | 0 |
| HT166 | | | 56 | | | | | 0 |
| HT183 | | | 58 | | | | | 165 |
| HT170 | | | 60 | | | | | 61 |
| HT172 | | | 62 | | | | | 133 |
| HT130 | | | 63 | | | | | 0 |
| HT176 | | | 64 | | | | | 32 |
| HT154 | | | 65 | | | | | 19 |
| HT183 | | | 66 | | | | | 40 |
| HT100 | | | 67 | | | | | 140 |
| HT100 | | | 68 | | | | | 0 |
| HT143 | | | 69 | | | | | 0 |
| HT180 | | | 70 | | | | | [symbol] |
| HT [symbol] | | | 71 | | | | | 130 |
| HT227 | | | 72 | | | | | 111 |
| HT322 | | | 73 | | | | | 0 |
| HT314 | | | 74 | | | | | 0 |
| HT317 | | | 76 | | | | | 0 |
| [symbol] | | | 77 | | | | | 0 |
| HT323 | | | 78 | | | | | 21 |
| HT327 | | | 80 | | | | | 137 |
| HT335 | | | 82 | | | | | 0 |
| HT144 | | | 85 | | | | | [symbol] |
| HT346 | | | 87 | | | | | 29 |
| HT311 | | | 170 | | | | | 18 |
| HT [symbol] | | | 185 | | | | | 0 |
| HT140 | | | 187 | | | | | 0 |
| HT201 | | | 190 | | | | | 236 |
| HT372 | | | 191 | | | | | 75 |
| TCCP | | | 207 | | | | | 40 |
| HT [symbol] | | | 214 | | | | | 44 |
| HT307 | | | 217 | | | | | 82 |
| HT [symbol] | | | 224 | | | | | 258 |
| HT370 | | | 226 | | | | | 0 |
| HT371 | | | 228 | | | | | 114 |
| HT377 | | | 230 | | | | | 125 |
| HT382 | | | [symbol] | | | | | 112 |
| [symbol] | | | [symbol] | | | | | 445 |
| HT334 | | | 290 | | | | | 231 |
| HT328 | | | 301 | | | | | 0 |
| HT302 | | | 315 | | | | | [symbol] 3 |
| HT304 | | | 317 | | | | | 0 |
| HT312 | | | 318 | | | | | 0 |
| HT162 | | | 325 | | | | | 0 |
| HT304 | | | 354 | | | | | 45 |
| HT187 | | | 300 | | | | | 13 |
| T-47D | 103 | | | | | | | 83 |
| [symbol] | 101 | | | | | | | 0 |
| [symbol] -423 | 154 | | | | | | | 0 |
| [symbol] | 157 | | | | | | | [symbol] |
| [symbol] | [symbol] | | | | | | | [symbol] |
| [symbol] | [symbol] | | | | | | | [symbol] |
| [symbol] | 151 | | | | | | | [symbol] |
| [symbol] | [symbol] | | | | | | | 7 |
| [symbol] | [symbol] | | | | | | | [symbol] |
| [symbol] | [symbol] | | | | | | | 0 |
| [symbol] | 144 | | | | | | | [symbol] |
| [symbol] | 143 | | | | | | | 0 |
| [symbol] | 142 | | | | | | | [symbol] |
| [symbol] | 141 | | | | | | | 4 |
| [symbol] | 140 | | | | | | | [symbol] |
| [symbol] | 139 | | | | | | | [symbol] |
| [symbol] | 138 | | | | | | | [symbol] |
| [symbol] | 137 | | | | | | | [symbol] |
| [symbol] | [symbol] | | | | | | | 0 |
| [symbol] | [symbol] | | | | | | | 0 |
| [symbol] | 134 | | | | | | | 0 |
| [symbol] | 133 | | | | | | | 0 |
| [symbol] | 132 | | | | | | | [symbol] |
| [symbol] | 131 | | | | | | | [symbol] |
| [symbol] | 130 | | | | | | | [symbol] |
| PC-3 | 129 | | | | | | | 0 |
| [symbol] | 128 | | | | | | | [symbol] |
| [symbol] | 127 | | | | | | | [symbol] |
| [symbol] | 126 | | | | | | | [symbol] |
| [symbol] | 125 | | | | | | | 0 |
| [symbol] | 124 | | | | | | | 137 |
| [symbol] | 123 | | | | | | | 0 |
| [symbol] | 122 | | | | | | | 138 |
| [symbol] | 121 | | | | | | | 0 |
| [symbol] | 120 | | | | | | | 118 |
| OVCAR-4 | 119 | | | | | | | 0 |
| [symbol] | 118 | | | | | | | 34 |
| OVCAR-4 | 117 | | | | | | | [symbol] |
| [symbol] | 116 | | | | | | | [symbol] |
| OVCAR-3 | 115 | | | | | | | [symbol] |
| [symbol] | 114 | | | | | | | 47 |
| [symbol] | 113 | | | | | | | 0 |
| [symbol] | 112 | | | | | | | 141 |
| [symbol] | 111 | | | | | | | 110 |
| [symbol] | 110 | | | | | | | [symbol] |
| [symbol] | 109 | | | | | | | 0 |
| [symbol] | 108 | | | | | | | [symbol] |
| [symbol] | 107 | | | | | | | 0 |
| [symbol] | 106 | | | | | | | 20 |
| [symbol] | 105 | | | | | | | 430 |
| [symbol] | 104 | | | | | | | 78 |
| [symbol] | 103 | | | | | | | 92 |
| [symbol] | 102 | | | | | | | 0 |
| [symbol] | 101 | | | | | | | 777 |
| [symbol] | 100 | | | | | | | 0 |
| [symbol] | 99 | | | | | | | 54 |
| OVCAR-4 | 98 | | | | | | | 0 |
| [symbol] | 97 | | | | | | | 43 |
| [symbol] | 48 | | | | | | | 148 |
| [symbol] | 47 | | | | | | | 210 |
| [symbol] | [symbol] | | | | | | | [symbol] |
| [symbol] | [symbol] | | | | | | | 0 |
| [symbol] -1 | | | | | | | [symbol] | 5 |
| [symbol] -3 | | | | | | | [symbol] | 379 |
| [symbol] -4 | | | | | | | [symbol] | [symbol] |
| [symbol] -5 | | | | | | | [symbol] | [symbol] |
| [symbol] -7 | | | | | | | [symbol] | 73 |
| EXVX-1 | | | | | | | [symbol] | 94 |
| EXVX-4 | | | | | | | [symbol] | [symbol] |
| EXVX-5 | | | | | | | [symbol] | 0 |
| EXVX-6 | | | | | | | [symbol] | [symbol] |
| EXVX-7 | | | | | | | [symbol] | 677 |
| MCF-7-1 | | | | | | | [symbol] | 0 |
| MCF-7-3 | | | | | | | [symbol] | [symbol] |
| MCF-7-4 | | | | | | | [symbol] | 318 |
| MCF-7-6 | | | | | | | [symbol] | 0 |
| MCF-7-7 | | | | | | | [symbol] | 0 |
| [symbol] -1 | | | | | | | [symbol] | [symbol] |
| [symbol] -3 | | | | | | | [symbol] | 198 |
| [symbol] -4 | | | | | | | [symbol] | 73 |
| [symbol] -6 | | | | | | | [symbol] | 19 |
| [symbol] -7 | | | | | | | [symbol] | [symbol] |
| WI 34-1 | | | | | | | [symbol] | 0 |
| WI 34-3 | | | | | | | [symbol] | 283 |
| WI 34-4 | | | | | | | [symbol] | [symbol] |
| WI 34-6 | | | | | | | [symbol] | [symbol] |
| WI 34-7 | | | | | | | [symbol] | 0 |
| [symbol] -1 | | | | | | | [symbol] | 0 |
| [symbol] -3 | | | | | | | [symbol] | [symbol] |
| [symbol] -4 | | | | | | | [symbol] | [symbol] |
| [symbol] -5 | | | | | | | [symbol] | [symbol] |
| [symbol] -7 | | | | | | | [symbol] | 105 |
| [symbol] -1 | | | | | | | [symbol] | 0 |
| [symbol] -3 | | | | | | | [symbol] | 0 |
| [symbol] -4 | | | | | | | [symbol] | 0 |
| [symbol] -5 | | | | | | | [symbol] | 0 |
| [symbol] -7 | | | | | | | [symbol] | 1 |
| [symbol] -2 | | | | | | | [symbol] | [symbol] |
| [symbol] -2 | | | | | | | [symbol] | 0 |
| [symbol] -1 | | | | | | | [symbol] | 0 |
| [symbol] -2 | | | | | | | [symbol] | [symbol] |
| [symbol] -2 | | | | | | | [symbol] | [symbol] |
| [symbol] -1 | | | | | | | [symbol] | 0 |
| [symbol] -2 | | | | | | | [symbol] | 3 |
| [symbol] -1 | | | | | | | [symbol] | 204 |
| [symbol] -2 | | | | | | | [symbol] | 831 |
| OVCAR-4-1 | | | | | | | [symbol] | 0 |
| OVCAR-4-2 | | | | | | | [symbol] | 0 |
| OVCAR-4-1 | | | | | | | [symbol] | 123 |
| OVCAR-4-2 | | | | | | | [symbol] | 234 |
| [symbol] -2 | | | | | | | [symbol] | [symbol] |
| [symbol] -2 | | | | | | | [symbol] | 271 |
| [symbol] -2 | | | | | | | [symbol] | 173 |
| [symbol] -1 | | | | | | | [symbol] | 0 |
| [symbol] -2 | | | | | | | [symbol] | [symbol] |
| [symbol] -2 | | | | | | | [symbol] | [symbol] |
| [symbol] -1 | | | | | | | [symbol] | 0 |
| [symbol] -2 | | | | | | | [symbol] | 0 |
| [symbol] -1 | | | | | | | [symbol] | 271 |
| [symbol] -2 | | | | | | | [symbol] | [symbol] |
| [symbol] -1 | | | | | | | [symbol] | 0 |
| [symbol] -2 | | | | | | | [symbol] | 24 |
| [symbol] -2 | | | | | | | | [symbol] |
| [symbol] -1 | | | | | | | | 0 |
| [symbol] -2 | | | | | | | | 0 |
| [symbol] | | | | | | | | 0 |
| [symbol] | | | | | | | | [symbol] |
| [symbol] | | | | | | | | [symbol] |
| [symbol] | | | | | | | | 0 |
| [symbol] | | | | | | | | 0 |
| [symbol] | | | | | | | | 0 |
| [symbol] | | | | | | | | [symbol] |
| [symbol] -4 | | | | | | | | 2301 |
| [symbol] -9 | | | | | | | | [symbol] |
| [symbol] -11 | | | | | | | | 2522 |
| [symbol] -12 | | | | | | | | [symbol] |
| [symbol] -10 | | | | | | | | 300 |
| [symbol] -1 | | | | | | | | 474 |
| [symbol] -2 | | | | | | | | 0 |
| [symbol] -3 | | | | | | | | 222 |
| [symbol] -4 | | | | | | | | 0 |
| [symbol] -5 | | | | | | | | 0 |
| [symbol] -6 | | | | | | | | 0 |
| [symbol] -8 | | | | | | | wt | 0 |
| EXVX-8 [symbol] | | | | | | | [symbol] | 50 |
| HCT-1 16-1 | | | | | | | wt | 0 |
| HCT-1 14-6 | | | | | | | wt | 0 |
| WT29-1 | | | | | | | [symbol] | 310 |
| WT29-7 | | | | | | | [symbol] | [symbol] |
| WT29-8 | | | | | | | [symbol] | 0 |
| SF434-7 | | | | | | | wt | 155 |
| SF434-8 | | | | | | | wt | 228 |
| SF200-7 | | | | | | | [symbol] | 218 |
| SF300-8 | | | | | | | [symbol] | [symbol] |
| OVCAR-4-7 | | | | | | | wt | 493 |
| OVCAR-4-8 | | | | | | | wt | 0 |
| OVCAR-5-7 | | | | | | | [symbol] | 531 |
| OVCAR-5-8 | | | | | | | [symbol] | [symbol] |
| [symbol] -7- [symbol] | | | | | | | wt | 33 |
| [symbol] -8 | | | | | | | [symbol] | 837 |
| [symbol] -8 | | | | | | | HPV E8 | 0 |
| SW420-7 | | | | | | | [symbol] | 0 |
| SW430-8 | | | | | | | [symbol] | 0 |
| Wt200-5 | | | | | | | [symbol] | 0 |
| C33A-7 | | | | | | | [symbol] | 0 |
| C33A-8 | | | | | | | [symbol] | 0 |
| U2OA-7 | | | | | | | [symbol] | 720 |
| U2OA-8 | | | | | | | [symbol] | 37 |
| [symbol] -7 | | | | | | | wt | 0 |
| [symbol] -8 | | | | | | | wt | 0 |
| WI30-8 | | | | | | | wt | 0 |
| [symbol] | | | | | | | | 0 |
| [symbol] , 1572, [symbol] | | | | | | | | 71 |
| [symbol] 4 | | | | | | 64 | | 221 |
| WT268 | | | | | | | | 80 |
| WT376 | | | | | | | | 183 |
| WT395 | | | | | | | | 88 |
| WT320 | | | | | | | | 0 |
| [symbol] -3 | | | | | | 173 | | 487 |
| [symbol] -6 | | | | | | 176 | | 117 |
| [symbol] -9 | | | | | | 177 | | 481 |
| [symbol] | | | | | | | | 0 |
| [symbol] | | | | | | 233 | | 0 |
| [symbol] | | | | | | | | 0 |
| [symbol] Mar. 31, 2002 [symbol] | | | | | | | | 0 |
| [symbol] | | | | | | | | 0 |
| [symbol] | | | | | | | | 22 |
| [symbol] | | | | | | | | 0 |
| [symbol] | | | | | | | | 0 |
| HCT-114-3 | | | | | | | wt | [symbol] |
| HCT-114-4 | | | | | | | wt | 0 |
| HCT-114-5 | | | | | | | wt | 0 |
| HCT-114-6 | | | | | | | wt | 0 |
| [symbol] -6 | | | | | | | wt | 0 |
| WT28-3 | | | | | | | [symbol] | 874 |
| EXVX-6 | | | | | | | [symbol] | 129 |
| WT29-4 | | | | | | | [symbol] | 640 |
| WT29-5 | | | | | | | [symbol] | 0 |
| WT29-6 | | | | | | | [symbol] | 177 |
| OVCAR-4-3 | | | | | | | wt | 220 |
| OVCAR-4-4 | | | | | | | wt | 0 |
| OVCAR-4-5 | | | | | | | wt | [symbol] |
| OVCAR-4-6 | | | | | | | wt | 0 |
| SF [symbol] -3 | | | | | | | wt | 728 |
| SF [symbol] -4 | | | | | | | wt | 83 |
| SF [symbol] -5 | | | | | | | wt | 0 |
| SF [symbol] -6 | | | | | | | wt | 0 |
| OVCAR-5-3 | | | | | | | [symbol] | 2718 |
| OVCAR-5-4 | | | | | | | [symbol] | 296 |
| OVCAR-5-5 | | | | | | | [symbol] | 0 |
| OVCAR-5-6 | | | | | | | [symbol] | 0 |
| MCF-7-6 | | | | | | | wt | 270 |
| [symbol] | | | | | | | HPV E5 | 371 |
| [symbol] | | | | | | | [symbol] | 0 |
| SW400-3 | | | | | | | [symbol] | 61 |
| SW400-4 | | | | | | | [symbol] | 0 |
| SW400-5 | | | | | | | [symbol] | 293 |
| SW400-6 | | | | | | | [symbol] | 225 |
| C33A-3 | | | | | | | [symbol] | 173 |
| C33A-4 | | | | | | | [symbol] | [symbol] |
| C33A-5 | | | | | | | [symbol] | 0 |
| C33A-6 | | | | | | | [symbol] | 56 |
| [symbol] -6 | | | | | | | wt | 0 [symbol] |
| U2O3-3 | | | | | | | [symbol] | 630 |
| U2O3-4 | | | | | | | [symbol] | [symbol] |
| U2O3-5 | | | | | | | [symbol] | 544 |
| U2O3-6 | | | | | | | [symbol] | 0 |
| Wt 30- [symbol] | | | | | | | wt | 0 |
| [symbol] -3 | | | | | | | wt | [symbol] |
| [symbol] -4 | | | | | | | wt | [symbol] |
| SF-200-3 | | | | | | | [symbol] | 277 |
| SF-200-4 | | | | | | | [symbol] | 0 |
| SF-200-5 | | | | | | | [symbol] | 123 |
| SF-200-6 | | | | | | | [symbol] | 33 |
| [symbol] -13 | | | | | | | | 21 |
| [symbol] -20 | | | | | | | | [symbol] |
| [symbol] -21 | | | | | | | | 0 |
| [symbol] -22 | | | | | | | | 0 |
| OVCAR-5-6 | | | | | | | [symbol] | [symbol] |
| [symbol] -10 | | | | | | | | [symbol] |
| [symbol] -11 | | | | | | | | [symbol] |
| [symbol] -12 | | | | | | | | [symbol] |
| [symbol] -13 | | | | | | | | 320 |
| [symbol] -14 | | | | | | | | 150 |
| [symbol] -15 | | | | | | | | 332 |
| [symbol] -16 | | | | | | | | 0 |
| [symbol] -17 | | | | | | | | 123 |
| [symbol] -18 | | | | | | | | 0 |
| [symbol] -19 | | | | | | | | 172 |

TABLE 4

| Gene Name | SP | ID# na | ID# aa | Family | Group | Length_AA | Extra-Catalytic Domains (Amino acid positions) |
|---|---|---|---|---|---|---|---|
| X69117_h beta_adrene | H | 1 | 122 | AGC | GRK | 688 | Regulator of G protein signating domain 54-175; |
| | | | | | | | PH domain 559-652 |
| AA144574_m | M | 2 | 123 | AGC | GRK | 378 | PH domain 249-337 |
| AA210825_h | H | 9 | 130 | AGC | PKC | 978 | Phorbol esters/diacylglycerol binding domain |
| | | | | | | | (C1 domain) 238-287; PH domain 497-577 |
| AA316804_h | H | 11 | 132 | AGC | PKC | 890 | Phorbol esters/diacylglycerol binding domain |
| | | | | | | | (C1 domain) 155-204 and 272-321; PH domain 417-532 |
| AA887763_h | H | 21 | 142 | AGC | SGK | 446 | PX domain 13-120 |
| AA021445_h 3 | H | 32 | 152 | CAMK | EMK | 1311 | Vitamin K-dependent carboxylation/gamma-carboxyglutamic |
| | | | | | | | (GLA) domain 1072-1113 |
| R31237_1_h, AAC3348 | H | 34 | 154 | CAMK | EMK | 729 | UBA domain 327-365 |
| 408786.5_h | H | 36 | 156 | CAMK | EMK | 1330 | PAS domain 133-186, 247-280, 354-386 |
| Z36720_h | H | 41 | 161 | CAMK | MLCK | 874 | WD domain, G-beta repeat 674-711 |
| SGK088_h | H | 42 | 162 | CAMK | Trio | 2287 | Immunoglobulin domain 1-62, 97-153, 221-277, |
| | | | | | | | 518-578, 1617-1678; Fibronectin type III domain 301-390, |
| | | | | | | | 1697-1779 |
| R19772_h | H | 44 | 164 | CAMK | Trio | 1287 | RhoGEF domain 235-405; Fibronectin type III domain |
| | | | | | | | 870-955; Immunoglobulin domain 786-851; PH |
| | | | | | | | domain 419-528 |
| 17000139801197_h, IRA | H | 76 | 195 | Other | IRAK | 596 | Death domain 26-106 |
| AA088547_h | H | 78 | 197 | Other | IRE | 922 | PQQ enzyme repeat 39-76 |
| AA232253_h | H | 82 | 201 | Other | MLK | 800 | SAM domain (Sterlie alpha motif) 337-408 |
| AA599286_h | H | 89 | 208 | Other | SLOB | 649 | PX domain 16-122 |
| AA838348_h | H | 113 | 232 | STE | NEK | 836 | Regulator of chromosome condensation (RCC1) 387-427, |
| | | | | | | | 427-480, 483-532, 598-650 |
| PAK6_h | H | 115 | 234 | STE | STE20-02 | 719 | P21-Rho-binding domain 11-69 |

The application's sequence listing, which the Patent Office published only in electronic form, follows.

SEQUENCE LISTING (269 sequences)

SEQ ID NO: 1 - DNA, 2067 bp, Homo sapiens
atggcggacctggaggccgtgctggccgatgtcagttacctgatggccatggagaagagcaaggcgaccccggccgcccgcgccagcaagaggatcgtcctgccggagcccagtatccggagtgtgatgcagaagtaccttgcagagagaaatgaaataacctttgacaagattttcaatcagaaaattggtttcttgctatttaaagatttttgtttgaatgaaattaatgaagctgtacctcaggtgaagttttatgaagagataaaggaatatgaaaaacttgataatgaggaagaccgcctttgcagaagtcgacaaatttatgatgcctacatcatgaaggaacttctttcctgttcacatcctttctcaaagcaagctgtagaacacgtacaaagtcatttatccaagaaacaagtgacatcaactctttttcagccatacatagaagaaatttgtgaaagccttcgaggtgacatttttcaaaaatttatggaaagtgacaagttcactagattttgtcagtggaaaaacgttgaattaaatatccatttgaccatgaatgagttcagtgtgcataggattattggacgaggaggattcggggaagtttatggttgcaggaaagcagacactggaaaaatgtatgcaatgaaatgcttagataagaagaggatcaaaatgaaacaaggagaaacattagctttaaatgaaagaatcatgttgtctcttgtcagcacaggagactgtcctttcattgtatgtatgacctatgccttccataccccagataaactctgcttcatcctggatctgatgaacgggggcgatttgcactaccacctttcacaacacggtgtgttctctgagaaggagatgcggttttatgccactgaaatcattctgggtctggaacacgtgcacaatcggtttgttgtctacagagatttgaagccagcaaatattctcttggatgaacatggacacgcaagaatatcagatcttggtcttgcctgcgatttttccaaaaagaagcctcatgcgagtgttggcacccatgggtacatggctcccgaggtgctgcagaaggggacggcctatgacagcagtgccgactggttctccctgggctgcatgcttttcaaacttctgagaggtcacagccctttcagacaacataaaaccaaagacaagcatgaaattgaccgaatgacactcaccgtgaatgtggaacttccagacaccttctctcctgaactgaagtcccttttggagggcttgcttcagcgagacgttagcaagcggctgggctgtcacggaggcggctcacaggaagtaaaagagcacagctttttcaaaggtgttgactggcagcatgtctacttacaaaagtacccaccacccttgattcctccccggggagaagtcaatgctgctgatgcctttgatattggctcatttgatgaagaggataccaaagggattaagctacttgattgcgaccaagaactctacaagaacttccctttggtcatctctgaacgctggcagcaagaagtaacggaaacagtttatgaagcagtaaatgcagacacagataaaatcgaggccaggaagagagctaaaaataagcaacttggccacgaagaagattacgctctggggaaggactgtattatgcacgggtacatgctgaaactgggaaacccatttctgactcagtggcagcgtcgctatttttacctctttccaaatagacttgaatggagaggagagggagagtcccggcaaaatttactgacaatggaacagattctctctgtggaagaaactcaaattaaagacaaaaaatgcattttgttcagaataaaaggagggaaacaatttgtcttgcaatgtgagagtgatccagagtttgtgcagtggaagaaagagttgaacgaaaccttcaaggaggcccagcggctattgcgtcgtgccccgaagttcctcaacaaacctcggtcaggtactgtggagctcccaaagccatccctctgtcacaggaacagcaacggcctctga

SEQ ID NO: 2 - DNA, 1368 bp, Murine sp.
ctgcttcgtagtctacagagacctgaagcctgcgaacatcctcctagatgaatatgggcacgtgaggatatcggatctcggccttgcctgtgatttctccaaaaagaagcctcatgccagcgtgggcacccatgggtacatggctcccgaggtgttgcagaagggaacgtgctatgacagcagcgccgactggttctccctgggctgtatgctcttcaaacttctgcggggccacagccccttcaggcagcataaaaccaaagacaagcatgagatagaccgaatgaccctgaccgtgaacgtgcagcttccagatgccttctcccctgagctgaggtccctcttagagggtttgctccagcgggacgtgagccagcggctgggctgcggaggaggaggggcacgagagttgaaggagcacatcttcttcaagggcattgactggcagcatgtgtacttacggaagtacccgccacccctaatccctcctcggggagaggtcaacgctgcagatgccttcgatatcggctccttcgatgaggaagacaccaaaggcattaagctgttggactgtgaccaggacctctataagaacttcccactggtgatctccgagcgctggcagcaagaagtggtggagaccatctatgacgccgtcaatgctgatactgataaaatcgaggccaggaagaaggctaaaaataagcaacttggtcaagaggaagattacgctatggggaaggactgcatcatgcacgggtacatgctgaagctggggaacccctttctcacacagtggcaaagacgctatttttacctgttccccaacagactggagtggagaggagagggcgagtctcggcaaagtctactgaccatggaacagatcatgtctgtggaggagacccagattaaagacagaaagtgcatcttactcaggataaagggagggaagcaatttgtcttgcaatgtgagagtgaccccgagtttgcacagtggctgaaggagctgacctgcaccttcaatgaggcccagagactgctgcgccgtgcccccaaattcctcaacaaaccacgggccgccatcctggagttctccaagccaccactgtgtcacagaaatagcagcggcctctgaaccacagagcagcggggcctgaaggaggggccccagctcttcagcccaggagtggaacgaagccacggggaaccgtgtggggctaagacacagtgtttctgagcactgacggggctgctccaagccgaggaggctcaggacaccagggcggccttctgggagctgggacatcctcggggctgtcctatccacactcgaaattactgaagaagcagaggcattctgctgtg

SEQ ID NO: 3 - DNA, 1787 bp, Homo sapiens
gaagaggatgggctcgtccatgtcggcggccaccgcgcggaggccggtgtttgacgacaaggaggacgtgaacttcgaccacttccagatccttcgggccattgggaagggcagctttggcaaggtgtgcattgtgcagaagcgggacacggagaagatgtacgccatgaagtacatgaacaagcagcagtgcatcgagcgcgacgaggtccgcaacgtcttccgggagctggagatcctgcaggagatcgagcacgtcttcctggtgaacctctggtactccttccaggacgaggaggacatgttcatggtcgtggacctgctactgggcggggacctgcgctaccacctgcagcagaacgtgcagttctccgaggacacggtgaggctgtacatctgcgagatggcactggctctggactacctgcgcggccagcacatcatccacagagatgtcaagcctgacaacattctcctggatgagagaggacatgcacacctgaccgacttcaacattgccaccatcatcaaggacggggagcgggcgacggcattagcaggcaccaagccgtacatggctccggagatcttccatcttttgtcaacggcgggaccggctactccttcgaggtggactggtggtcggtgggggtgatggcctatgagctgctgcgaggatggaggccctatgacatccactccagcaacgccgtggagtccctggtgcagctgttcagcaccgtgagcgtccagtatgtccccacgtggtccaaggagatggtggccttgctgcggaagctcctcactgtgaaccccgagcaccggctctccagcctccaggacgtgcaggcagccccggcgctggccggcgtgctgtgggaccacctgagcgagaagagggtggagccgggcttcgtgcccaacaaaggccgtctgcactgcgaccccacctttgagctggaggagatgatcctggagtccaggcccctgcacaagaagaagaagcgcctggccaagaacaagtcccgggacaacagcagggacagctcccagtccgagaatgactatcttcaagactgcctcgatgccatccagcaagacttcgtgatttttaacagagaaaagctgaagaggagccaggacctcccgagggagcctctccccgcccctgagtccagggatgctgcggagcctgtggaggacgaggcggaacgctccgccctgcccatgtgcggccccatttgcccctcggccgggagcggctaggccgggatgcccgtggtcctcaccccttgagctgctttggagactcggctgccagagggagggccatgggccgaggcctggcattcacgttcccacccagcctggctggcggtgcccacagtgccccggacacatttcacacctcaggctcgtggtggtgcaggggacaagaggctgtgggtgcaggggacacctgtggagggcatttcccgtgggcccccgagacccgcctagatggaggaagcgctgctgggcgccctcttaccgctcacggggagctggggccatggatgggacaggagtctttgtccctgctcagcccggaggctgtgcacggccctcgtcacaaggtgacccttgcagcacaggccgcgggtgccccaggctcggctcagttcttggaggtcaagggcatgggttggggtagtgggtggggaggtgaatgttttctagagattcaaactgctccagcaatttctgtatagttttcacctctgagaattacaatgtgagaaccgctc

SEQ ID NO: 4 - DNA, 3224 bp, Homo sapiens
gtcccacatcccgcatccggcatcccagcggccgggcatgtagcagcggcagcaacggcggaatatgggcgggaaccactcccacaagccccccgtgtttgacgagaatgaggaagtcaactttgaccattttcagattctgcgggccattggtaaagggagttttggaaaggtatgcatcgtgcagaagcgagacactaagaaaatgtatgcaatgaagtacatgaacaagcagaagtgcatcgagagggatgaggttcggaatgttttccgggagctgcagatcatgcaagggctggagcaccccttcctggtcaatctgtggtactccttccaggatgaggaggacatgttcatggtggtggacctgctcctgggaggcgacctgcgctaccatctgcagcagaatgtgcatttcacagaggggactgtgaaactctacatctgtgagctggcactggccctggagtatcttcagaggtaccacatcatccacagagacatcaagccagacaatatcctgctggatgaacacggacatgttcacattacagacttcaacatagcgacggtagtgaaaggagcagaaagggcttcctccatggctggcaccaagccctacatggctccagaagtattccaggtgtacatggacagaggccccggatactcgtaccctgtcgactggtggtccctgggcatcacagcctatgagctgctgcggggctggaggccgtacgaaatccactcggtcacgcccatcgatgaaatcctcaacatgttcaaggtggagcgtgtccactactcctccacgtggtgcaaggggatggtggccctgctgaggaagctcctgaccaaggatcctgagagccgcgtgtccagccttcatgacatacagagcgtgccctacttggccgacatgaactgggacgcggtgttcaagaaggcactgatgcccggctttgtgcccaataaagggaggttgaactgcgatcccacatttgagcttgaagagatgattctagaatccaagccacttcacaaaaagaagaagcgattggcaaagaacagatccagggatggcacaaaggacagctgcccgctgaatggacacctgcagcactgtttggagactgtccgggaggaattcatcatattcaacagagagaagctcaggaggcagcagggacagggcagccagctcttggacaccgacagccgagggggaggccaggcccaaagcaagctccaggacgggtgcaacaacaacctcctcacccacacctgcacccgtggctgcagcagctgagcccacacttgttgctgctcaacaggactgcactcgtctctgccctgcccacccagagcccctctttgtgccctgatggtccctgtctcacccctgaaaacatcagatgcagaaaaagccctggacttggagctgggaagcctgggttctggtcccatctccatgactgattcacgtgtgacctcagacaagtcacgccctctctgtgcctccgttttctgcatctgccaaaggggttaaacacttctgccccacttcaaattacaagattatggggagaacccaattaggtaggaaacatgaaaaacctttgatatttataaaatcatttttacgtgcaaaatataaccttaatatttgaagtgacccccattccccaaagcaatcaaaccgtcatgactttgcaatttggcacatcctagcttgttagagggcacttccgaaaaacacagccctgacagcaaaataaaggtctgatatgttggccccttctatggaaacaacgctgccaaatcctggagcaaaacctgaagtgtcttcatgtgcattctctggcaggccacagtcctgagcttgtaagatggtgcagcatgcagaccagacttgtccccaaggtctcagcgctgcggtctcactcctcccctcatttaagaagactatccttaccttttagtttcagcagtcctcaccaccaccatatccccagtgctgggatggcacacaggtgtccattcagatgagagttgggtcgctgagcattggttactcctgcagagtgtaatcagcaccccatccaactggcccgaaagcccagacctgcagcagaactctccaactctctatcagctttcagggttttctctcctgggaagggtgtaaaatcagcttgtcagattcttcttacagagagtatccaatcggtattggtggagcggctccctatttatacaataggaagcatgggtgcttagaaagtttatttcaggaggaaaatgggttcacacaaaaagcaaactacattctgatctgctcagggagaagcttgcctttgaactggaagatgttgggatgagcagggaaagcttagactttggagtcaggtttgtgttcagaatccagccctgctggctactaactaactgggagaccttaggcaaagcatgcaatcgctctgaatggcagtttcctcatttttaaacagggataataaaactaatattgcaggggagttacagggttaaataagatcctgtgtgtaaccccaagcattggatgactcatagaatggccttttttgtcagcataatcgtcatcattatttagatactttcttccttcactcacccagcaggtcagttttctgtgcaaacaaacctgtttaggattcttccaaatgttcttcctggggtctttgatatttgtttgttacatcctgctgaagttcgactgtgtttttattttttcatccaacttccatttttcactttttacatgattactcaatccttggggctgtccatgtcatctcttagatttcttaaaagacattttaatgtatggttaggttttatatttttattttttaaaaaagaaatagtcagtgttttcctcctttcaaccgagactatttctggattgtgtgctcctcgtcagttgacttgttttgcacacttttctttacttcatgtccccatcaacaaccgtcctgctccccacctcccccaggaaataaggggcctgctcctctccctactgtgaccctggaggctcttaagatgatgatggttttttttattgggctgagttcacgaattaggggcaggagctggaagtcgccctaggaacaccagatttcctggttctgttcaagttggcatttcttgtttggaataaactatttcttggacattccttc

SEQ ID NO: 5 - DNA, 3013 bp, Homo sapiens
tcctgagtctcgaggaggccgcgggagcccgccggcggtggcgcggcggagacccggctggtataacaagaggattgcctgatccagccaagatgcagagcacttctaatcatctgtggcttttatctgatattttaggccaaggagctactgcaaatgtctttcgtggaagacataagaaaactggtgatttatttgctatcaaagtatttaataacataagcttccttcgtccagtggatgttcaaatgagagaatttgaagtgttgaaaaaactcaatcacaaaaatattgtcaaattatttgctattgaagaggagacaacaacaagacataaagtacttattatggaattttgtccatgtgggagtttatacactgttttagaagaaccttctaatgcctatggactaccagaatctgaattcttaattgttttgcgagatgtggtgggtggaatgaatcatctacgagagaatggtatagtgcaccgtgatatcaagccaggaaatatcatgcgtgttataggggaagatggacagtctgtgtacaaactcacagattttggtgcagctagagaattagaagatgatgagcagtttgtttctctgtatggcacagaagaatatttgcaccctgatatgtatgagagagcagtgctaagaaaagatcatcagaagaaatatggagcaacagttgatctttggagcattggggtaacattttaccatgcagctactggatcactgccatttagaccctttgaagggcctcgtaggaataaagaagtgatgtataaaataattacaggaaagccttctggtgcaatatctggagtacagaaagcagaaaatggaccaattgactggagtggagacatgcctgtttcttgcagtctttctcggggtcttcaggttctacttacccctgttcttgcaaacatccttgaagcagatcaggaaaagtgttggggttttgaccagttttttgcagaaactagtgatatacttcaccgaatggtaattcatgttttttcgctacaacaaatgacagctcataagatttatattcatagctataatactgctactatatttcatgaactggtatataaacaaaccaaaattatttcttcaaatcaagaacttatctacgaagggcgacgcttagtcttagaacctggaaggctggcacaacatttccctaaaactactgaggaaaaccctatatttgtagtaagccgggaacctctgaataccataggattaatatatgaaaaaatttccctccctaaagtacatccacgttatgatttagacggggatgctagcatggctaaggcaataacaggggttgtgtgttatgcctgcagaattgccagtaccttactgctttatcaggaattaatgcgaaaggggatacgatggctgattgaattaattaaagatgattacaatgaaactgttcacaaaaagacagaagttgtgatcacattggatttctgtatcagaaacattgaaaaaactgtgaaagtatatgaaaagttgatgaagatcaacctggaagcggcagagttaggtgaaatttcagacatacacaccaaattgttgagactttccagttctcagggaacaatagaaaccagtcttcaggatatcgacagcagattatctccaggtggatcactggcagacgcatgggcacatcaagaaggcactcatccgaaagacagaaatgtagaaaaactacaagtcctgttaaattgcatgacagagatttactatcagttcaaaaaagacaaagcagaacgtagattagcttataatgaagaacaaatccacaaatttgataagcaaaaactgtattaccatgccacaaaagctatgacgcactttacagatgaatgtgttaaaaagtatgaggcatttttgaataagtcagaagaatggataagaaagatgcttcatcttaggaaacagttattatcgctgactaatcagtgttttgatattgaagaagaagtatcaaaatatcaagaatatactaatgagttacaagaaactctgcctcagaaaatgtttacagcttccagtggaatcaaacataccatgaccccaatttatccaagttctaacacattagtagaaatgactcttggtatgaagaaattaaaggaagagatggaaggggtggttaaagaacttgctgaaaataaccacattttagaaaggtttggctctttaaccatggatggtggccttcgcaacgttgactgtctttagctttctaatagaagtttaagaaaagtttccgtttgcacaagaaaataacgcttgggcattaaatgaatgcctttatagatagtcacttgtttctacaatccagtatttgatgtggtcgtgtaaatatgtacaatattgtaaatacataaaaaatatacaaatttttggctgctgtgaagatgtaattttatcttttaacatttataattatatgaggaaatttgacctcagtgatcacgagaagaaagccatgaccgaccaatatgttgacatactgatcctctactctgagtggggctaaataagttattttctctgaccgcctactggaaatatttttaagtggaaccaaaataggcatccttacaaatcaggaagactgacttgacacgtttgtaaatggtagaacggtggctactgtgagtggggagcagaaccgcaccactgttatactgggataacaatttttttgagaaggataaagtggcattattttattttacaaggtgcccagatcccagttatccttgtatccatgtaatttcagatgaattattaagcaaacattttaaagtgaattcattattaaaaactattcatttttttcctttggccataaatgtgtaattgtcattaaaattctaaggtcatttcaactgttttaagctgtatatttctttaattctgcttactatttcatggaaaaaaataaatttctcaattttaaaaaa

SEQ ID NO: 6 - DNA, 1421 bp, Homo sapiens
tggctgctcgcggaggggcagtgtacgcggggccgctgtaggctgtccagcgatggatcccaccgcgggaagcaagaaggagcctggaggaggcgcggcgactgaggagggcgtgaataggatcgcagtgccaaaaccgccctccattgaggaattcagcatagtgaagcccattagccggggcgccttcgggaaagtgtatctggggcagaaaggcggcaaattgtatgcagtaaaggttgttaaaaaagcagacatgatcaacaaaaatatgactcatcaggtccaagctgagagagatgcactggcactaagcaaaagcccattcattgtccatttgtattattcactgcagtctgcaaacaatgtctacttggtaatggaatatcttattgggggagatgtcaagtctctcctacatatatatggttattttgatgaagagatggctgtgaaatatatttctgaagtagcactggctctagactaccttcacagacatggaatcatccacagggacttgaaaccggacaatatgcttatttctaatgagggtcatattaaactgacggattttggcctttcaaaagttactttgaatagagatattaatatgatggatatccttacaacaccatcaatggcaaaacctagacaagattattcaagaaccccaggacaagtgttatcgcttatcagctcgttgggatttaacacaccaattgcagaaaaaaatcaagaccctgcaaacatcctttcagcctgtctgtctgaaacatcacagctttctcaaggactcgtatgccctatgtctgtagatcaaaaggacactacgccttattctagcaaattactaaaatcatgtcttgaaacagttgcctccaacccaggaatgcctgtgaagtgtctaacttctaatttactccagtctaggaaaaggctggccacatccagtgccagtagtcaatcccacaccttcatatccagtgtggaatcagaatgccacagcagtcccaaatgggaaaaagattgccaggtttgagggacatttatcttaatgaaaatcaattatgtatgtcaaatgaatgtgagaaatattataccttttcatataaattccataaagaaatgaaattgttacatgaatggcagtcatagtattaatcagaaattcattttcctgcacattctgtcaaattcttttgaaatatttcatttctcattcaattgtgacattgttcttacttgattatataatgagattcttgcagtaaattgataataaatgcttggcttctgtgtatctaggtggacctcacttgtttttagaagtccttcccatgatacagacattggcttgttggttttgttttattttgtttttaacatatgtcatttaaaaactcatattacctcctttt

SEQ ID NO: 7 - DNA, 582 bp, Murine sp.
ccacgcgtccgatcccatggccagaaggcgaagaaaagctatctgataatgctcaaagtgcaatggacatgcttttaaccattgatgattcaaagagagctggaatgagagaactaaaacagcatcctctcttcagtgaagtggactgggaaaatctgcagcatcagactatgcctttcgtaccccaaccagacgacgaaacagatacatcctattttgaagccagaaataatgctcaacatctgaccgtatctgggtttagtctgtagcacatgcgtgtcatttttatctaacttgtgatatagaattaagttttacagtaatatgctacttaatactagattggtctaaatgggataaaagtcattattttacccagactgaacagcttttaattactaagtacaacagtttttacagaattaaaatactataagcaatataatcagtaattaatctttaccttagaactgtatataagccataatagcttttttcatcttatttattcactgcactttatgaagagcaaagtatcaataaactaaaacactaccactctaaatagagggagtgagccgt

SEQ ID NO: 8 - DNA, 4983 bp, Homo sapiens
agggagctgacgggcgcccggccggctgcggtccgtgcggaggctgagccggccgcgggcgcgaccggaggcagtttccgttactatggcaatgacggcagggactacaacaacctttcctatgagcaaccatacccgggaaagagtgactgtagccaagctcacattggagaatttttatagcaacctaattttacagcatgaagagagagaaaccaggcagaagaaattagaagtggccatggaagaagaaggattagcagatgaagagaaaaagttacgtcgatcacaacacgctcgcaaagaaacagagttcttacggctcaaaaggaccagacttggcttggatgactttgagtctctgaaagttataggaagaggagcttttggagaggtgcggttggtccagaagaaagatacaggccatatctatgcaatgaagatattgagaaagtctgatatgcttgaaaaagagcaggtggcccatatccgagcagaaagagatattttggtagaagcagatggtgcctgggtggtgaagatgttttacagttttcaggataagaggaatctttatctaatcatggaatttctccctggaggtgacatgatgacattgctaatgaagaaagacaccttgacagaagaggaaacacagttctacatttcagagactgttctggcaatagatgcgatccaccagttgggtttcatccatcgggatattaagccagacaaccttttattggatgccaagggtcatgtaaaattatctgattttggtttatgtacgggattaaagaaagctcacaggactgaattttatagaaatctcacacacaacccaccaagtgacttctcatttcagaacatgaactcaaagaggaaagcagaaacttggaagaagaacaggagacaactggcatattccacagttgggacaccagattacattgctccagaagtattcatgcagactggttacaacaaattgtgtgactggtggtctttgggagtgattatgtatgaaatgctaataggatatccacctttctgctctgaaacacctcaagaaacatacagaaaagtgatgaactggaaagaaactctggtatttcctccagaggtacctatatctgagaaagccaaggacttaattctcagattttgtattgattctgaaaacagaattggaaatagtggagtagaagaaataaaaggtcatcccttttttgaaggtgtcgactgggagcacataagggaaaggccagcagcaatccctatagaaatcaaaagcattgatgatacttcaaattttgatgacttccctgaatctgatattttacaaccagtgccaaataccacagaaccggactacaaatccaaagactgggtttttctcaattatacctataaaaggtttgaagggttgactcaacgtggctctatccccacctacatgaaagctgggaagttatgaatgaagataacattcacccataaccaagagaactcaggtagctgcatcaccaggcttgcttggcgtagataacaatacactgaaatactcctgaagatggtggtgcttattgactacaagaggaaattctacaggattaggatttctaagactactataggaattggttggcagtgccagctggctcttttttttaatattttattatttttgttaactttattatatgaaggtactggaataaaaggaacagacatccctttctaactgcactgcctacatgcgtattaaggtccattctgcctgtgtgtgctgtggctttgaactgtaacacctctaatcaattcaggagaaacacatatcatttaaagcaacataggctaacctgtaggtaacactgcagtattgatgttttactgcaaatcttatgggtctagataatcagtaaaagccatcttccatagttggtgttagaacattgccctattggtttggacatctgtagaatatatatgaagacaatttctgtaatggttttaagagatttaaaaagaaattcactggttctttacaaaatagaatttatcatcaagttattacacaaacttcacagtaaggagtgacaagtttataataaggaagacaaagtttaacaccttcactcaagcactccactaatatatttacgttgcattcagaaatactgatgaccttcatatacgtagtctgtatactcatagggagatgtactgtattatataacatgtaaagttgattttcttgtgacaagagaacttctttttttaacaagaggacatggcattattttaatttgattatggtgagttgaatttaagacatgaccatgaaggctgcttgtagaattagtgtatttttattaaactatttttttaaatgtcaaacttctatcatgtaaatggacttatagagaacaaaaagctatttactttggttttctagaaagttgttacatatcatggctggttaacttttatttcttttgatgaaaatttttcctttgatagtacttgtattattgtgccattattttcttatgctccaaatgtaccaaagatcttgaacagagtggatgttcacaactgagtagaattttcctttcctgtgggcatgctgtattcagacctgacagatctttgatagaggtcagcttattaaagggcaatattgttcttgtttagctacatcactgtggtgaatatagatggaattaaggaagtaaatgcaggccagggggttgtgatgagaggataggggagataatatcagcatcaaattctttgggtatctctctaagaattaaataatcttttctagcttaatattttaattctaattcaaacaactctgaggttttggtttcattagtaatagttgaggaataatatactagcaaagaatggcctaatgtttgtcataactgttaatggatgaaattttttaaagatacaaccatgataaccattataaatgatctatgatcaaaatctaaagtgatgaattatttgtaggaatgtcttcctaatggggaagaattgcataggagcattatgcaaatctacacaagcttttataaatgttgctgctgggtagctccacagtgtttcataaggccatcctgtttcccccaactcccccatttttggtttgtttctttttaaatatttgttgagtacttacgtgtttatctaacagttcacttccatttttctagtctggattttttgagtatttaggaaagagagctattaaaaactctggggatttctcaatgtgactaactctaatttttctaattataactgcctttaattaacataatattaacttttgctgaggtttatgagattttctcaccccacatcgctcccctttttttaaaaaggactgttttgctagtgtgataatgaataggtaagatatgagataattgcaacattgtcctagttctagtatggtaactattcttgaaatggtattgaaaaataccgttaattcaaattgacagagattgataaaaagaaactgatttacctaagtttactttttaattgcataatagagcattttttgttttgagttccctcattcttattaccagaaagagcttgcaaatagttttactttcttggcactggaagggtagttctggaaagctactttgttgagagtctcattcttccctggagttaatagagtgattcacaatctttggggttttctcctcatcaaaagcatttcttaagtgcctatctaaaagcaattaaagactgtgtctgccctttagaagctaagaatttgattcatgatgcaaattaactagataatttgcaaagtacccttgagattgaattttctctattatatatttcccatatttcaggtgaataatttaatttaaatgacaaaaccctatctagtcaactgggcataatgacattttctttaaattagactctattttgaattaaaagagttttattataaaccgtgtgtttttggtttttctaagtatatagaaagcttgtataattcagatttatcaatttcctgatttaatgtagactttgacttttttattaaaaacctttgtattaaagcaagttatgttatttttcttttatgcatttattactaacatagctttaaatctttaaatgtattgaagcattgtgctgtctgaaaataaggaattgcttataaaccagccacttctgaatacaatatgtagctgatttaataagctagttagtgaatggaaaataagtgtggagtattaaaaatgttctttggttggtaaggcctaagatagggtttcatttatttctatactttttctgttttttaaacacctgcatatttttatgtaaatctctaaatttaaaatattttaagtacatttatttttggtgttttattgtataaaaccttagacaatcaatcagtcagtctttactgacaggagcagcagctatctgtcttttgctgatctacaaataaatgaattgagaatttagtccatagaggtccctggctaccaaacacattctcctttgaattgttaaaattcagaacattcaaaataactgttttgctacaacccatgattattttcctgttgtgtttatttaaatttactttctctttagaagtgcacttatttctgaaaaatcttaatgaaacaaacgcttagaacaaatataaatatgagacacttgggactactagagatattttagatttttatgaaaaaaatgtgaggggatattgctgctttaaaaaggaataaagtaataaaaatatatctcagctatttttttaaagcaatataattcagcaattgtctagaaaagtaatcatgaggctactgagtttggtgttcagttactgagtttcaaaaatgttttggtggcatgaggacaaaatttcattgaaggtaagataagaataaaaactatgtttac

SEQ ID NO: 9 - DNA, 3263 bp, Homo sapiens
  modified_base (1915)..(1916): a, t, c, g, other or unknown
cacgagggctactggcgcctggcgaccctccctgccccccacccaaccccgctccggcaacgcccccttcctcacggctcccgaccgaacttttctccaacttctgcgactcgtgagattcccttctacccactccggccctcgggacccctctgcccatcccctggccggtcgggtccctgcgaacccctttatctctggaatccactcggtccccgactcagagactcctgccctccacccccaaggaccccgccatcctcaggtcccctccgcctgccagatcttttctcggatccccgctctcccaccacctgctcacgagatcccgcggatctagaacccagggtcccccggggccccccggcgggtcccgggtgggctccaggcgggcggtccccggcctccccccatggccaccgccccctcattatcccgccgggctccctggctctcccgggccggggtctcctccgccccccggcggcctagagctgcagtcgccgccaccgctactgccccagatcccggccccgggttccggggtctcctttcacatccagatcgggctgacccgcgagttcgtgctgttgcccgccgcctccgagctggctcatgtgaagcagctggcctgttccatcgtggaccagaagttccctgagtgtggcttctacggcctttacgacaagatcctgcttttcaaacatgaccccacgtcggccaacctcctgcagctggtgcgctcgtccggagacatccaggagggcgacctggtggaggtggtgctgtcggcctcggccaccttcgaggacttccagatccgcccgcacgccctcacggtgcactcctatcgggcgcctgccttctgtgatcactgcggggagatgctcttcggcctagtgcgccagggcctcaagtgcgatggctgcgggctgaactaccacaagcgctgtgccttcagcatccccaacaactgtagtggggcccgcaaacggcgcctgtcatccacgtctctggccagtggccactcggtgcgcctcggcacctccgagtccctgccctgcacggctgaagagctgagccgtagcaccaccgaactcctgcctcgccgtcccccgtcatcctcttcctcctcttctgcctcatcgtatacgggccgccccattgagctggacaagatgctgctctccaaggtcaaggtgccgcacaccttcctcatccacagctatacacggcccaccgtttgccaggcttgcaagaaactcctcaagggcctcttccggcagggcctgcaatgcaaagactgcaagtttaactgtcacaaacgctgcgccacccgcgtccctaatgactgcctgggggaggcccttatcaatggagatgtgccgatggaggaggccaccgatttcagcgaggctgacaagagcgccctcatggatgagtcagaggactccggtgtcatccctggctcccactcagagaatgcgctccacgccagtgaggaggaggaaggcgagggaggcaaggcccagagctccctggggtacatccccctaatgagggtggtgcaatcggtgcgacacacgacgcggaaatccagcaccacgctgcgggagggttgggtggttcattacagcaacaaggacacgctgagaaagcggcactattggcgcctggactgcaagtgtatcacgctcttccagaacaacacgaccaacagatactataaggaaattccgctgtcagaaatcctcacggtggagtccgcccagaacttcagccttgtgccgccgggcaccaacccacactgctttgagatcgtcactgccaatgccacctacttcgtgggcgagatgcctggcgggactccgggtgggccaagtgggcagggggctgaggccgcccgggggctggnngagacagccatccgccaggccctgatgcccgtcatccttcaggacgcacccagcgccccaggccacgcgccccacagacaagcttctctgagcatctctgtgtccaacagtcagatccaagagaatgtggacattgccactgtctaccagatcttccctgacgaagtgctgggctcagggcagtttggagtggtctatggaggaaaacaccggaagacaggccgggacgtggcagttaaggtcattgacaaactgcgcttccctaccaagcaggagagccagctccggaatgaagtggccattctgcagagcctgcggcatcccgggatcgtgaacctggagtgcatgttcgagacgcctgagaaagtgtttgtggtgatggagaagctgcatggggacatgttggagatgatcctgtccagtgagaagggccggctgcctgagcgcctcaccaagttcctcatcacccagatcctggtggctttgagacaccttcacttcaagaacattgtccactgtgacttgaaaccagaaaacgtgttgctggcatcagcagacccatttcctcaggtgaagctgtgtgactttggctttgctcgcatcatcggcgagaagtcgttccgccgctcagtggtgggcacgccggcctacctggcacccgaggtgctgctcaaccagggctacaaccgctcgctggacatgtggtcagtgggcgtgatcatgtacgtcagcctcagcggcaccttccctttcaacgaggatgaggacatcaatgaccagatccagaacgccgccttcatgtacccggccagcccctggagccacatctcagctggagccattgacctcatcaacaacctgctgcaggtgaagatgcgcaaacgctacagcgtggacaaatctctcagccacccctggttacaggagtaccagacgtggctggacctccgagagctggaggggaagatgggagagcgatacatcacgcatgagagtgacgacgcgcgctgggagcagtttgcagcagagcatccgctgcctgggtctgggctgcccacggacagggatctcggtggggcctgtccaccacaggaccacgacatgcaggggctggcggagcgcatcagtgttctctgaggtcctgtgccctcgtccagctgctgccctccacagcggttcttcacaggatcccagcaatgaactgttctagggaaagtggcttcctgcccaaactggatgggacacgtggggagtggggtggggggagctatttccaaggcccctccctgtttccccagcaattaaaacggactcatctctggccccatggccttgatctcagcaaaa

SEQ ID NO: 10 - DNA, 315 bp, Homo sapiens
attcaattcataattgttggtgcaaaagatttgcttgctatggattcaaatggtctttctgatccttacatcaaaatcacaaatctttctcaaaaaacgaaagtgattaagaaaactttgactccaacttggaatgaaactttttttgtgcattttccagaaaaaacaacccttgaattagaatgttgggaccacgatactttttcagatgattttattggcaaggcttccatttctttggcagagattccagctttggcagaagttgatatgtggatagatatgaaaacgaaaaaaggagaatttgcaggaaaa

SEQ ID NO: 11 - DNA, 2673 bp, Homo sapiens
atgtctgcaaataattcccctccatcagcccagaagtctgtattacccacagctattcctgctgtgcttccagctgcttctccgtgttcaagtcctaagacgggactctctgcccgactctctaatggaagcttcagtgcaccatcactcaccaactccagaggctcagtgcatacagtttcatttctactgcaaattggcctcacacgggagagtgttaccattgaagcccaggaactgtctttatctgctgtcaaggatcttgtgtgctccatagtttatcaaaagtttccagagtgtggattctttggcatgtatgacaaaattcttctctttcgccatgacatgaactcagaaaacattttgcagctgattacctcagcagatgaaatacatgaaggagacctagtggaagtggttctttcagctttagccacagtagaagacttccagattcgtccacatactctctatgtacattcttacaaagctcctactttctgtgattactgtggtgagatgctgtggggattggtacgtcaaggactgaaatgtgaaggctgtggattaaattaccataaacgatgtgccttcaagattccaaataactgtagtggagtaagaaagagacgtctgtcaaatgtatctttaccaggacccggcctctcagttccaagacccctacagcctgaatatgtagcccttcccagtgaagagtcacatgtccaccaggaaccaagtaagagaattccttcttggagtggtcgcccaatctggatggaaaagatggtaatgtgcagagtgaaagttccacacacatttgctgttcactcttacacccgtcccacgatatgtcagtactgcaagcggttactgaaaggcctctttcgccaaggaatgcagtgtaaagattgcaaattcaactgccataaacgctgtgcatcaaaagtaccaagagactgccttggagaggttactttcaatggagaaccttccagtctgggaacagatacagatataccaatggatattgacaataatgacataaatagtgatagtagtcggggtttggatgacacagaagagccatcacccccagaagataagatgttcttcttggatccatctgatctcgatgtggaaagagatgaagaagccgttaaaacaatcagtccatcaacaagcaataatattccgctaatgagggttgtacaatccatcaagcacacaaagaggaagagcagcacaatggtgaaggaagggtggatggtccattacaccagcagggataacctgagaaagaggcattattggagacttgacagcaaatgtctaacattatttcagaatgaatctggatcaaagtattataaggaaattccactttcagaaattctccgcatatcttcaccacgagatttcacaaacatttcacaaggcagcaatccacactgttttgaaatcattactgatactatggtatacttcgttggtgagaacaatggggacagctctcataatcctgttcttgctgccactggagttggacttgatgtagcacagagctgggaaaaagcaattcgccaagccctcatgcctgttactcctcaagcaagtgtttgcacttctccagggcaagggaaagatcacaaagatttgtctacaagtatctctgtatctaattgtcagattcaggagaatgtggatatcagtactgtttaccagatctttgcagatgaggtgcttggttcaggccagtttggcatcgtttatggaggaaaacatagaaagactgggagggatgtggctattaaagtaattgataagatgagattccccacaaaacaagaaagtcaactccgtaatgaagtggctattttacagaatttgcaccatcctgggattgtaaacctggaatgtatgtttgaaaccccagaacgagtctttgtagtaatggaaaagctgcatggagatatgttggaaatgattctatccagtgagaaaagtcggcttccagaacgaattactaaattcatggtcacacagatacttgttgctttgaggaatctgcattttaagaatattgtgcactgtgatttaaagccagaaaatgtgctgcttgcatcagcagagccatttcctcaggtgaagctgtgtgactttggatttgcacgcatcattggtgaaaagtcattcaggagatctgtggtaggaactccagcatacttagcccctgaagttctccggagcaaaggttacaaccgttccctagatatgtggtcagtgggagttatcatctatgtgagcctcagtggcacatttccttttaatgaggatgaagatataaatgaccaaatccaaaatgctgcatttatgtacccaccaaatccatggagagaaatttctggtgaagcaattgatctgataaacaatctgcttcaagtgaagatgagaaaacgttacagtgttgacaaatctcttagtcatccctggctacaggactatcagacttggcttgaccttagagaatttgaaactcgcattggagaacgttacattacacatgaaagtgatgatgctcgctgggaaatacatgcatacacacataaccttgtatacccaaagcacttcattatggctcctaatccagatgatatggaagaagatccttaa

SEQ ID NO: 12 - DNA, 2670 bp, Homo sapiens
atggaggagggggcgccgcggcagcctgggccgagccagtggcccccagaggatgagaaggaggtgatccgccgggccatccagaaagagctgaagatcaaggagggggtggagaacctgcggcgcgtggccacagaccgccgccacttgggccatgtgcagcagctgctgcggtcctccaaccgccgcctggagcagctgcatggcgagctgcgggagctgcacgcccgaatcctgctgcccggccctgggcctggcccagctgagcctgtggcctcaggaccccggccgtgggcagagcagctcagggctcggcacctagaggctctccggaggcagctgcatgtggagctgaaggtgaaacagggggctgagaacatgacccacacgtgcgccagtggcacccccaaggagaggaagctccttgcagctgcccagcagatgctgcgggacagccagctgaaggtggccctgctgcggatgaagatcagcagcctggaggccagtgggtccccggagccagggcctgagctactggcggaggagctacagcatcgactgcacgttgaggcagcggtggctgagggcgccaagaacgtggtgaaactgcttagtagccggagaacacaggaccgcaaggcactggctgaggcccaggcccagctacaggagtcctctcagaaactggacctcctgcgcctggccttggagcagctgctggagcaactgcctcctgcccaccctttgcgcagcagagtgacccgagagttgcgggctgcggtgcctggatacccccagccttcagggacacctgtgaagcccaccgccctaacagggacactgcaggtccgcctcctgggctgtgaacagttgctgacagccgtgcctgggcgctccccagcggccgcactggccagcagcccctccgagggctggcttcggaccaaggccaagcaccagcgtggccgaggcgagcttgccagtgaggtgctggctgtgctaaaggtggacaaccgtgttgtggggcagacgggctgggggcaggtggccgaacagtcctgggaccagacctttgtcatcccactggagcgagcccgtgagctggagattggggtacactggcgggactggcggcagctatgtggcgtggccttcctgagacttgaagacttcctggacaatgcctgtcaccaactgtccctcagcctggtaccgcagggactgctttttgcccaggtgaccttctgcgatcctgtcattgagaggcggccccggctgcagaggcaggaacgcatcttctctaaacgcagaggccaggacttcctgaggcgttcgcagatgaacctcggcatggcggcctgggggcgcctcgtcatgaacctgctgcccccctgcagctccccgagcacaatcagcccccctaaaggatgccctcggaccccaacaacactgcgagaggcctctgaccctgccactcccagtaatttcctgcccaagaagacccccttgggtgaagagatgacacccccacccaagcccccacgcctctacctcccccaggagccaacatccgaggagactccgcgcaccaaacgtccccatatggagcctaggactcgacgtgggccatctccaccagcctcccccaccaggaaaccccctcggcttcaggacttccgctgcttagctgtgctgggccggggacactttgggaaggtcctcctggtccagttcaaggggacagggaaatactacgccatcaaagcactgaagaagcaggaggtgctcagccgggacgagatagagagcctgtactgcgagaagcggatcctggaggctgtgggctgcacagggcaccctttcctgctctccctccttgtctgcttccagacctccagccatgcccgctttgtgactgagtttgtgcctggtggtgacctcatgatgcagatccacgaggatgtcttccccgagccccaggcccgcttctacgtggcttgtgttgtcctggggctgcagttcttacacgagaagaagatcatttacagggacctgaagttggataaccttctgctggatgcccagggattcctgaagatcgcagactttggactctgcaaggaagggatcggcttcggggaccggactagcaccttctgtggcaccccggagttcctggctcccgaggtgctgacccaggaggcatacacacaggccgtcgactggtgggcgctgggtgtgctgctctacgagatgctggtgggtgagtgcccgttcccaggggacacagaggaagaggtgtttgactgcatcgtcaacatggacgccccctaccccggctttctgtcggtgcaagggcttgagttcattcagaagctcctccagaagtgcccggagaagcgcctcggggcaggtgagcaggatgccgaggagatcaaggtccagccattcttcaggaccaccaactggcaagccctgctcgcccgcaccatccagccccccttcgtgcctaccctgtgtggccctgcggacctgcgctactttgagggcgagttcacagggctgccgcctgccctgaccccacctgcaccccacagcctcctcactgcccgccaacaggccgccttccgggacttcgactttgtgtcagagcgattcctggaaccctga

SEQ ID NO: 13 - DNA, 929 bp, Murine sp.
gctgaagtgggataaccttctgctggatgcccagggattcctgaagatcgcagactttggactctgcaaggaagggatcggcttcggggaccggactagcaccttctgtggcaccccggagttcctggctcccgaggtgctgacccaggaggcatacacacgggctgtggactggtgggggctgggtgtgctgctctacgagatgctggtgggtgagtgcccgttcccaggggacacagaggaagaggtgtttgactgcatcgtcaacatggacgccccctaccccggctttctgtcggtgcaagggcttgagttcattcagaagctcctccagaagtgcccggagaagcgcctcggggcgggtgagcaggatgccgaggagatcaaggtccagccattcttcaggaccaccaactggcaagccctgctcgcccgcaccatccagcccccctttgtgcctaccctgtgtggccctgcggacctgcgctactttgagggcgagttcacagggctgccgcctgccctgaccccacctgcaccccacagcctcctcactgcccgccaacaggccgccttccgggacttcgactttgtgtcagagcgattcctggaaccctgagggcatctcctggcacctctgtccccttcccccacagactgttagagcctctgctcgttcacccgtgcgccctgcctggaggtccaggccttgctgggtacttctgagcccttgggattcaaagtggcagccatggggccactgttgtgggctttgctcagtgtcactgggcaaagtgtgtcccttccccctccagctcgccctcttctacctcccagcgagacctggcccagaaagggtgccgcagcaaggagtgatatggtttgtctttttaagactggacttgctttatattaaatttgtaaaagtg

SEQ ID NO: 14 - DNA, 1155 bp, Homo sapiens
ggtggcaacatccggggtccctgggcccgaggctggaagagcctctggacaggtttgggaaccatcaggtcagatctggaagaactctgggaactacgggggcaccactatctgcaccaggaatccctaaagccagccccagtactggtagagaagcctctgccagagtggccagtgcctcagttcatcaacctctttctaccagagtttcccattaggcccattagggggcagcagcagctgaagattttaggcctcgtggctaaaggctcctttggaactgtcctcaaggtgctagattgcacccagaaagctgtatttgcagtgaaggtggtgcccaaggtaaaggtcctacagagggataccgtgaggcagtgcaaagaggaggttagcatccagcgacagatcaaccatccctttgtacacagcttgggggacagctggcagggaaaacggcaccttttcattatgtgtagctactgcagcacagatctgtactccctttggtcggctgttggctgctttcctgaggcttccatccgtctctttgctgccgagttggtgctggtactgtgttatctccatgacttgggcatcatgcatcgagatgtgaagatggagaatattcttctagatgaacgaggccatctgaaactgacagactttggtctgtcccgccacgtgccccagggagctcaagcctacactatctgtggcactcttcagtacatggccccagaggtcctaagtggaggaccttacaaccatgctgctgattggtggtccctgggtgtcttgcttttctctctggcgactggaaagtttccagtggctgcagagagagatcatgtggccatgttggcaagtgtgacccacagtgactctgagatcccagcttctcttaaccagggcctctcactcctgctccatgagctcttatgccagaaccccctccatcgtctacgttatctgcatcacttccaggtccaccctttctttcggggtgtggccttcgacccagagctcctacagaagcagccagtgaactttgtcacggagacacaagctacccagcccagttcagcggagaccatgccctttgacgactttgactgtgatctggagtccttcttgctctaccctatccctgcttga

SEQ ID NO: 15 - DNA, 1410 bp, Homo sapiens
atggaattctttaggatagacagtaaggatagcgcaagtgaactcctgggacttgactttggagaaaaattgtatagtctaaaatcagaacctttgaaaccattctttactcttccagatggagacagtgcttctaggagttttaatactagtgaaagcaaggtagagtttaaagctcaggacaccattagcaggggctcagatgactcagtgccagttatttcgtttaaagatgctgcttttgatgatgtcagtggtactgatgaaggaagacctgatcttcttgtaaatttacctggtgaattggagtcaacaagagaagctgcagcaatgggacctactaagtttacacaaactaatatagggataatagaaaataaactcttggaagcccctgatgttttatgcctcaggcttagtactgaacaatgccaagcacatgaggagaaaggcatagaggaactgagtgatccctctgggcccaaatcctatagtataacagagaaacactatgcacaggaggatcccaggatgttatttgtagcagctgttgatcatagtagttcaggagatatgtctttgttacccagctcagatcctaagtttcaaggacttggagtggttgagtcagcagtaactgcaaacaacacagaagaaagcttattccgtatttgtagtccactctcaggtgctaatgaatatattgcaagcacagacactttaaaaacagaagaagtattgctgtttacagatcagactgatgatttggctaaagaggaaccaacttctttattccagagagactctgagactaagggtgaaagtggtttagtgctagaaggagacaaggaaatacatcagatttttgaggaccttgataaaaaattagcactagcctccaggttttacatcccagagggctgcattcaaagatgggcagctgaaatggtggtagcccttgatgctttacatagagagggaattgtgtgccgcgatttgaacccaaacaacatcttattgaatgatagaggacacattcagctaacgtattttagcaggtggagtgaggttgaagattcctgtgacagcgatgccatagagagaatgtactgtgccccagaggttggagcaatcactgaagaaactgaagcctgtgattggtggagtttgggtgctgtcctctttgaacttctcactggcaagactctggttgaatgccatccagcaggaataaatactcacactactttgaacatgccagaatgtgtctctgaagaggctcgctcactcattcaacagctcttgcagttcaatcctctggaacgacttggtgctggagttgctggtgttgaagatatcaaatctcatccattttttacccctgtggattgggcagaactgatgagatga

SEQ ID NO: 16 - DNA, 2238 bp, Homo sapiens
atgctaccattcgctcctcaggacgagccctgggaccgagaaatggaagtgttcagcggcggcggcgcgagcagcggcgaggtaaatggtcttaaaatggttgatgagccaatggaagagggagaagcagattcttgtcatgatgaaggagttgttaaagaaatccctattactcatcatgttaaggaaggctatgagaaagcagatcctgcacagtttgagttgctcaaggttcttggtcaggggtcatttggaaaggtttttcttgttagaaagaagaccggtcctgatgctgggcagctctatgcaatgaaggtgttaaaaaaagcctctttaaaagttcgagacagagttcggacaaagatggagagggatatactggtggaagtaaatcatccatttattgtcaaattgcactatgcctttcagactgaagggaaactgtacttaatactggattttctcaggggaggagatgttttcacaagattatccaaagaggttctgtttacagaggaagatgtgaaattctacctcgcagaactggcccttgctttggatcatctgcaccaattaggaattgtttatagagacctgaagccagaaaacattttgcttgatgaaataggacatatcaaattaacagattttggactcagcaaggagtcagtagatcaagaaaagaaggcttactcattttgtggtacagtagagtatatggctcctgaagtagtaaataggagaggccattcccagagtgctgattggtggtcatatggtgttcttatgtttgaaatgcttactggtactctgccatttcaaggtaaagacagaaatgagaccatgaatatgatattaaaagcaaaacttggaatgcctcaatttcttagtgctgaagcacaaagtcttctaaggatgttattcaaaaggaatccagcaaatagattgggatcagaaggagttgaagaaatcaaaagacatctgttttttgcaaatattgactgggataaattatataaaagagaagttcaacctcctttcaaacctgcttctggaaaaccagatgatactttttgttttgatcctgaatttactgcaaaaacacctaaagattctcccggtttgccagccagtgcaaatgctcatcagctcttcaaaggattcagctttgttgcaacttctattgcagaagaatataaaatcactcctatcacaagtgcaaatgtattaccaattgttcagataaatggaaatgctgcacaatttggtgaagtatatgaattgaaggaggatattggtgttggctcctactctgtttgcaagcgatgcatacatgcaactaccaacatggaatttgcagtgaagatcattgacaaaagtaagcgagacccttcagaagagattgaaatattgatgcgctatggacaacatcccaacattattactttgaaggatgtctttgatgatggtagatatgtttaccttgttacggatttaatgaaaggaggagagttacttgaccgtattctcaaacaaaaatgtttctcggaacgggaggctagtgatatactatatgtaataagtaagacagttgactatcttcattgtcaaggagttgttcatcgtgatcttaaacctagtaatattttatacatggatgaatcagccagtgcagattcaatcaggatatgtgattttgggtttgcaaaacaacttcgaggagaaaatggacttctcttaactccatgctacactgcaaactttgttgcacctgaggttcttatgcaacagggatatgatgctgcttgtgatatctggagtttaggagtccttttttacacaatgttggctggctacactccatttgctaatggccccaatgatactcctgaagagatactgctgcgtataggcaatggaaaattctctttgagtggtggaaactgggacaatatttcagacggagcaaaggatttgctttcccatatgcttcatatggacccacatcagcggtatactgctgaacaaatattaaagcactcatggataactcacagagaccagttgccaaatgatcagccaaagagaaatgatgtgtcacatgttgttaagggagcaatggttgcaacatactctgccctgactcacaagacctttcaaccagtcctagagcctgtagctgcttcaagcttagcccagcgacggagcatgaaaaagcgaacatcaactggcctgtaa

SEQ ID NO: 17 - DNA, 1650 bp, Homo sapiens
atgagcctggtggcctgtgagtgcctgcccagccccggcctggagcctgagccttgctcacgagcacggtcccaagctcacgtgtacctggagcagattcgcaacagggtggctctgggagtgcctgacatgacaaaacgtgactatctggtggatgcggccacgcagatccggctggccctggagcgcgatgttagtgaggactatgaggcggccttcaaccactatcagaatggcgtggacgtgctgctccgtggcatacacgttgaccccaacaaggagcgacgtgaggctgtgaagctgaaaattaccaaatacctgcggcgggcagaggagatcttcaactgccacctgcagcggccgctgagcagtggagccagccccagcgcgggtttcagcagcctgaggctccggcccattcgcacgctgagctctgccgtggagcagctgaggggctgcagggtggtcggggtcatcgagaaggtgcagctggtccaggacccggcaaccggagggacctttgtggtgaagagcctacccaggtgccacatggtgagcagggagcggctgaccatcatcccacacggagtcccctacatgacgaagctgctcaggtactttgtgagcgaggactccatcttcctgcacctggagcatgtgcaaggaggcactctctggtcccacctgctctcccaggcgcactcccgacattctgggctcagctctggctctacccaggagaggatgaaggctcagctcaacccccacctcaacctcctgaccccagcgaggcttccctcaggccatgcccctggccaggacagaatcgccctggagcctcctaggacttctccgaaccttctcctagctggggaggccccatccaccagaccccagagggaggctgaaggtgaacccacagccaggaccagcacctctggctcctcggaccttccaaaggccccaggtggccacctgcaccttcaagctaggagggctggccagaactcagacgctgggccccctcgggggctcacttgggttcctgagggggccggcccggtgctagggggctgtggccgaggcatggatcagagctgcctgtcagcagatggggccggccggggctgtggcagggccacctggagtgtgagagaggagcaggtgaagcagtgggcggcagagatgctggtagcgctggaggcgctgcacgagcagggggtgctgtgccgggacctccaccccgggaacctgctcctggaccaggcaggtcacatccggctcacatattttggccagtggtcagaggtggagccccagtgctgcggggaggccgtggacaatctctacagcgccccagaggtgggtgggatttccgagctgacggaagcctgtgactggtggagctttgggtctctactgtatgaactgctgacgggaatggcactgtcccagagccacccttcaggaatccaggcccacacccagctccagctgcccgagtggctcagtcgcccagcggcctctctgctgactgagctgctgcagttcgagcctacccggcgcctgggcatgggagaaggtggtgtcagcaaactcaagtcccatccctttttcagtaccatccaatggagcaagctggtggggtaa

SEQ ID NO: 18 - DNA, 1296 bp, Homo sapiens
atgacggtgaaaactgaggctgctaagggcaccctcacttactccaggatgaggggcatggtggcaattctcatcgctttcatgaagcagaggaggatgggtctgaacgactttattcagaagattgccaataactcctatgcatgcaaacaccctgaagttcagtccatcttgaagatctcccaacctcaggagcctgagcttatgaatgccaacccttctcctccaccaagtccttctcagcaaatcaaccttggcccgtcgtccaatcctcatgctaaaccatctgactttcacttcttgaaagtgatcggaaagggcagttttggaaaggttcttctagcaagacacaaggcagaagaagtgttctatgcagtcaaagttttacagaagaaagcaatcctgaaaaagaaagaggagaagcatattatgtcggagcggaatgttctgttgaagaatgtgaagcaccctttcctggtgggccttcacttctctttccagactgctgacaaattgtactttgtcctagactacattaatggtggagagttgttctaccatctccagagggaacgctgcttcctggaaccacgggctcgtttctatgctgctgaaatagccagtgccttgggctacctgcattcactgaacatcgtttatagagacttaaaaccagagaatattttgctagattcacagggacacattgtccttactgatttcggactctgcaaggagaacattgaacacaacagcacaacatccaccttctgtggcacgccggagtatctcgcacctgaggtgcttcataagcagccttatgacaggactgtggactggtggtgcctgggagctgtcttgtatgagatgctgtatggcctgccgcctttttatagccgaaacacagctgaaatgtacgacaacattctgaacaagcctctccagctgaaaccaaatattacaaattccgcaagacacctcctggagggcctcctgcagaaggacaggacaaagcggctcggggccaaggatgacttcatggagattaagagtcatgtcttcttctccttaattaactgggatgatctcattaataagaagattactcccccttttaacccaaatgtgagtgggcccaacgagctacggcactttgaccccgagtttaccgaagagcctgtccccaactccattggcaagtcccctgacagcgtcctcgtcacagccagcgtcaaggaagctgccgaggctttcctaggcttttcctatgcgcctcccacggactctttcctctga

SEQ ID NO: 19 - DNA, 2432 bp, Murine sp.
  modified_base (795): a, t, c, g, other or unknown
cgggtcgacccacgcgtccgccggtttcactgctcccctcagtctcttttgggctctttccgggcatcgggacgatgaccgtcaaagccgaggctgctcgaagcacccttacctactccagaatgaggggaatggtagcgattctcatcgcttttatgaaacagagaaggatgggcctgaacgattttattcagaagattgccagcaacacctatgcatgcaaacacgctgaagttcagtccattttgaaaatgtcccatcctcaggagccggagcttatgaacgctaacccctctcctccgccaagtccctctcaacaaatcaacctgggtccgtcctccaaccctcacgccaaaccctccgactttcacttcttgaaagtgatcggaaagggcagttttggaaaggttcttctggctaggcacaaggcagaagaagtattctatgcagtcaaagttttacagaagaaagccatcctgaagaagaaagaggagaagcatattatgtcagagcggaatgttctgttgaagaatgtgaagcaccctttcctggtgggccttcacttctcattccagaccgctgacaagctctactttgtcctggactacattaatggtggagagctgttctaccatctccagagggagcgctgcttcctggaaccacgggctcgattctacgcagctgaaatagccagtgccctgggctatctgcactccctaaacatcgtttatagagacttaaaacctgagaatattctcctagactcccaggggcacatcgtcctcactgacntatttcagctgcgtagaatcgagcataacgggacaacatctaccttctgtggcacgcctgagtatctggctcctgaggtcctccataagcagccgtatgaccggacggtggactggtggtgtcttggggctgtcctgtatgagatgctctacggcctgcccccgttttatagccggaacacggctgagatgtacgacaatattctgaacaagcctctccagttgaaaccaaatattacaaactcggcaaggcacctcctggaaggcctcctgcagaaggaccggaccaagaggctgggtgccaaggatgactttatggagattaagagtcatattttcttctctttaattaactgggatgatctcatcaataagaagattacacccccatttaacccaaatgtgagtgggcccagtgaccttcggcacttcgatcccgagtttaccgaggagccggtccccagctccatcggcaggtcccctgacagcatccttgtcacggccagtgtgaaggaagcagcagaagccttcctcggcttctcctatgcacctcctgtggattccttcctctgagtgctcccgggatggttctgaaggacttcctcagcgtttcctaaagtgttttcgttagcctttggtggagttgccagctgacagaacattttaaaagaatttgcacacctggaagcttggcagtctcgcctgcccggcgtggcgcgacgcagcgcgcgctgcttgatgggagctttccgaagagcacaccctcctctcaatgagcttgtgaggtcttcttttcttctcttccttccaacgtggtgctagctccaggcgagcgagcgtgagagtgccgcctgagacagacaccttggtctcagttagaaggaagatgcaggtctaagaggaatccccgcaggtctgtctgagctgtgatcaagaatattctgcaatgtgccttttctgagatcgtgttagctccaaagctttttcctatcgcagagtgttcagtttgtgtttgtttgtttttgttttgttttgtttttcccttggcggatttcccgtgtgtgcagtggcgtgagtgtgctatgcctgatcacagacggttttgttgtgagcatcaatgtgacacttgcaggacactacaatgtgggacattgtttgtttcttccacatttggaagataaatttatgtgtagactgttttgtaagatatagttaataactaaaacctattgaaacggtcttgcaatgacgagcattcagatgcttaaggaaagcattgctgctacaaatatttctatttttagaaagggtttttatggaccaatgccccagttgtcagtcaaagccgttggtgttttcattgtttaaaatgtcacctataaaacgggcattatttatgttttttttccctttgttcatattcttttgcattcctgattattgtatgtatcgtgtaaaggaagtctgtacattgggttataacactagatatttaaacttacaggcttatttgtaaaccatcattttaatgtactgtaattaacatgggttataatatgtacaattcctcctccttaccacacaactttttttgtgtgcgataaaccaattttggtttgcaataaaatcttgaaaact

SEQ ID NO: 20 - DNA, 1346 bp, Murine sp.
ccacctgcagcgggagcgccggttcctggagccccgggccaggttctacgctgctgaggtggccagcgccattggctacctgcactccctcaacatcatttacagggatctgaaaccagagaacattctcttggactgccagggacacgtggtgctgacggattttggcctctgcaaggaaggtgtagagcctgaagacaccacatccacattctgtggtacccctgagtacttggcacctgaagtgcttcggaaagagccttatgatcgagcagtggactggtggtgcttgggggcagtcctctacgagatgctccatggcctgccgcccttctacagccaagatgtatcccagatgtatgagaacattctgcaccagccgctacagatccccggaggccggacagtggccgcctgtgacctcctgcaaagccttctccacaaggaccagaggcagcggctgggctccaaagcagactttcttgagattaagaaccatgtattcttcagccccataaactgggatgacctgtaccacaagaggctaactccacccttcaacccaaatgtgacaggacctgctgacttgaagcattttgacccagagttcacccaggaagctgtgtccaagtccattggctgtacccctgacactgtggccagcagctctggggcctcaagtgcattcctgggattttcttatgcgccagaggatgatgacatcttggattgctagaagagaaggacctgtgaaactactgaggccagctggtattagtaaggaattaccttcagctgctaggaagagcgactcaaactaacaatggcttcaacgagaagcaggtttattttttccagcacataaaagaaaaataatgtttcggagtccaggactggcaggacaggtcatcagatactcagaggctgtatctctgccctgccaaccttgacaaatggcttccaatgttaggtttgctacaagatggttactggagctctagctgcctattttgtgtttagggaagggaaaatggaggaaaggggagaagagcaaagggcgcttttaaagagctttcccaaaagctccacccaatgacttctgcttccatctcactaaccacccacccctacctggaatggaggctgggagatgtggcttatttgctgggtacgtgactatccctaataacaaaggggttctgacactaagacattaggggagaatgttgggtaggcagccagcactcttttaccagagggcctcctggtgtttggattttgatctcaatgtgtaaaatgacagagatgtaacaagctcatagggtatcaatatctcttattgttct

SEQ ID NO: 21 - DNA, 2250 bp, Homo sapiens
  modified_base (12): a, t, c, g, other or unknown
  modified_base (86): a, t, c, g, other or unknown
  modified_base (238): a, t, c, g, other or unknown
cggatgcatttnttggtgtgctcttgagggattaaatgcaaagagatcacaccatggactacaaggaaagctgcccaagtgtaagnattcccagctccgatgaacacagagagaaaaagaagaggtttactgtttataaagttctggtttcagtgggaagaagtgaatggtttgtcttcaggagatatgcagagtttgataaactttataacactttaaaaaaacagtttcctgctanggccctgaagattcctgccaagagaatatttggtgataattttgatccagattttattaaacaaagacgagcaggactaaacgaattcattcagaacctagttaggtatccagaactttataaccatccagatgtcagagcattccttcaaatggacagtccaaaacaccagtcagatccatctgaagatgaggatgaaagaagttctcagaagctacactctacctcacagaacatcaacctgggaccgtctggaaatcctcatgccaaaccaactgactttgatttcttaaaagttattggaaaaggcagctttggcaaggttcttcttgcaaaacggaaactggatggaaaattttatgctgtcaaagtgttacagaaaaaaatagttctcaacagaaaagagcaaaaacatattatggctgaacgtaatgtgctcttgaaaaatgtgaaacatccgtttttggttggattgcattattccttccaaacaactgaaaagctttattttgttctggattttgttaatggaggggagggacatgttgtcttaacagattttgggctttgtaaagaaggaattgctatttctgacaccactaccacattttgtgggacaccagagtatcttgcacctgaagtaattagaaaacagccctatgacaatactgtagattggtggtgccttggggctgttctgtatgaaatgctgtatggattgcctcctttttattgccgagatgttgctgaaatgtatgacaatatccttcacaaacccctaagtttgaggccaggagtgagtcttacagcctggtccattctggaagaactcctagaaaaagacaggcaaaatcgacttggtgccaaggaagactttcttgaaattcagaatcatcctttttttgaatcactcagctgggctgaccttgtacaaaagaagattccaccaccatttaatcctaatgtggctggaccagatgatatcagaaactttgacacagcatttacagaagaaacagttccatattctgtgtgtgtatcttctgactattctatagtgaatgccagtgtattggaggcagatgatgcattcgttggtttctcttatgcacctccttcagaagacttatttttgtgagcagtttgccattcagaaaccattgagcaaaataagtctatagatgggactgaaacttctatttgtgtgaatatattcaaatatgtataactagtgcctcatttttatatgtaatgatgaaaactatgaaaaaatgtattttcttctatgtgcaagaaaaatagggcatttcaaagagctgttttgattaaaatttatattcttgtttaataagcttatttttaaacaatttaaaagctattattcttagcattaacctatttttaaagaaaccttttttgctattgactgttttttccctctaagtttacactaacatctacccaagatagactgttttttaacagtcaatttcagttcagctaacatatattaatacctttgtaactctttgctatggcttttgttatcacaccaaaactatgcaattggtacatggttgtttaagaagaaaccgtatttttccatgataaatcactgtttgaaatatttggttcatggtatgatcgaaatgtaaaagcataattaacacattggctgctagttaacaattggaataactttattctgcagatcatttaagaagtaacaggccgggcgcggtggctcacgcctgtaatcccagcactttgggaggctgaggcgggcagatcacctgaggtcaggagttggagaccagcctgaccaacatggacaaaccccgtctctactaaaaatacaaaattggcagggtgtggtggcacatgcctataatcccagctacttgggaggctaaggcaggagaatcgcttgaacccgggaggcggaggttgcagtgagccgagatcgcaccattgcactcctgcctgggcaacaagagtgaaactccatctcc

SEQ ID NO: 22 - DNA, 1050 bp, Homo sapiens
atggcgcaccaaacgggcatccacgccacggaagagctgaaggaattctttgccaaggcacgggctggctctgtgcggctcatcaaggttgtgattgaggacgagcagctcgtgctgggtgcctcgcaggagccagtaggccgctgggatcaggactatgacagggccgtgctgccactgctggacgcccagcagccctgctacctgctctaccgcctcgactcacagaatgctcagggcttcgaatggctcttcctcgcctggtcgcctgataactcccccgtgcggctgaagatgctgtacgcggccacgcgggccacagtgaaaaaggagtttggaggtggccacatcaaggatgagctcttcgggactgtgaaggatgacctctcttttgctgggtaccagaaacacctgtcgtcctgtgcggcacctgccccgctgacctcggctgagagagagctccagcagatccgcattaacgaggtgaagacagagatcagtgtggaaagcaagcaccagaccctgcagggcctcgccttccccctgcagcctgaggcccagcgggcactccagcagctcaagcagaaaatggtcaactacatccagatgaagctggacctagagcgggaaaccattgagctggtgcacacagagcccacggatgtggcccagctgccctcccgggtgccccgagatgctgcccgctaccacttcttcctctacaagcacacccatgagggcgacccccttgagtctgtagtgttcatctactccatgccggggtacaagtgcagcatcaaggagcgaatgctctactccagctgcaagagccgcctcctcgactccgtggagcaggacttccatctggagatcgccaagaaaattgagattggcgatggggcagagctgacggcagagttcctctacgacgaggtgcaccccaagcaacacgccttcaagcaggccttcgccaagcccaagggcccagggggcaagcggggccataagcgcctcatccgcggcccgggtgaaaatggggatgacagctag

SEQ ID NO: 23 - DNA, 2310 bp, Homo sapiens
ccacgcgtccggcgccgcagccatggagggaggcggcggcggcggcggcggcggctcgggtggctgcgctgggaggcggcggtgagaggctcgcacgcctccagcccggccccggccccccgggagggagagccgagcagccccggctctgggctacggactatgggcgaatagctctgaccacccggcgaagtgcacacacccagaagctatgtccttcggcagtaaaagttttacagcacaatatatgtgctctgctctcctcccgcaatcctgctccaagagatcttaagctggaggcaccaggtctgaattccagactcctccccaccacccacacttcacctccaactggagcatgaccacagacccattcagggaggctggcggactcttcatcctggacagtcccttactgtatgtcaaagctgagaatgaagcggagagcatcagacagaggagctggggaaacgtcggccagggccaaggctctaggaagtgggatttctggaaataatgcaaagagagctggaccattcatccttggtccccgtctgggcaactcaccggtgccaagcatagtgcagtgtttggcgaggaaagatggcacggatgacttctatcagctgaagatcctgaccctggaggagaggggggaccaaggcatagagagccaggaagagcggcagggcaagatgctgctgcacaccgagtactcactgctgtctctcctgcacacgcaggatggcgtggtgcaccaccacggcctcttccaggaccgcacctgtgaaatcgttgaggacacagaatccagccggatggttaagaagatgaagaagcgcatctgcctcgtcctggactgcctctgtgctcatgacttcagcgataagaccgctgacctcatcaacctgcagcactacgtcatcaaggagaagaggctcagcgagagggagactgtggtaatcttctacgacgtggtccgcgtggtggaggccctgcaccagaaaaatatcgtgcacagagacctgaagctggggaacatggtgctcaacaagaggacacatcggataaccatcaccaacttctgcctcgggaagcatctggtgagcgagggggacctgctgaaggaccagagagggagccctgcctacatcagtcccgacgtgctcagcggccggccgtaccgtggcaagcccagtgacatgtgggccctgggcgtggtgctcttcaccatgctgtatggccagttccccttctacgacagcatcccgcaggagctcttccgcaagatcaaggctgccgagtataccattcctgaggatggacgggtttctgagaacaccgtgtgtctcatccggaagctgctggtccttgacccccagcagcgcctggccgccgccgacgtcctggaggccctcagtgccatcattgcatcatggcagtccctgtcatctctgagtgggcctttgcaagtggttcctgacattgatgaccaaatgagcaatgcggatagctcccaggaggcgaaggtgacggaggagtgctcccagtacgagtttgagaactacatgcgtcagcagctgctgctggccgaggagaagagctccatccatgacacccggagctgggtacccaagcggcagttcggcagcgcaccaccggtgcgacggctgggccacgacgcacagcccatgacctccttggacacggccatcctggcgcagcgctacctgcggaaataacagcctcagccggggccaccagcactgctgccacttcttccagccccagccaaaggcgtggctgtcagggctgggccctgtagtgctggactctcccgggccacaatagggacagggcagggacagggacagcccaggtcacacgtggggtcagcagaggtaccacgaagctaccttttgggatgattgctcgattgtttggtttttaaatctgagaagcctagataactaatctgcttttaatcacgatgttttaatctacctctgtctctttaaccatgctgtctctggactgagcaagagggaggagggagcctgctcaccccactccagggccttccccagcggccaccaactgacctggggcgctgctccccacagtccaaataagctgaaagtgcagctcgctgcaggccccagagcgagcttcccctcctccctgctctcccaggcccctgccacagcctctttccgtccctctctttctgatccaggcccctcagtccaagctttggaaaaccttcacctcatcttaaaccaaactcaaatatatttatttttttaccat

SEQ ID NO: 24 - DNA, 3240 bp, Homo sapiens
  modified_base (716): a, t, c, g, other or unknown
gccgcgatggccagcaccaggagtatcgagctggagcactttgaggaacgggacaaaaggccgcggccggggtcgcggagaggggcccccagctcctccgggggcagcagcagctcgggccccaaggggaacgggctcatccccagtccggcgcacagtgcccactgcagcttctaccgcacgcggaccctgcaggccctcagctcggagaagaaggccaagaaggcgcgcttctaccggaacggggaccgctacttcaagggcctggtgtttgccatctccagcgaccgcttccggtccttcgatgcgctcctcatagagctcacccgctccctgtcggacaacgtgaacctgccccagggtgtccgcactatctacaccatcgacggcagccggaaggtcaccagcctggacgagctgctggaaggtgagagttacgtgtgtgcatccaatgaaccatttcgtaaagtcgattacaccaaaaatattaatccaaactggtctgtgaacatcaagggtgggacatcccgagcgctggctgctgcctcctctgtgaaaagtgaagtaaaagaaagtaaagatttcatcaaacccaagttagtgactgtgattcgaagtggagtgaagcctagaaaagccgtgcggatccttctgaataaaaagactgctcattcctttgaacaagtcttaacagatatcaccgaagccattaaacnagcctcaggagtcgtcaagaggctctgcaccctggatggaaagcaggtgagagttacgtgtgtgcatctgccagacttttttggtgatgacgatgtttttattgcatgtggaccagaaaaatttcgttatgcccaagatgactttgtcctggatcatagtgaatgtcgtgtcctgaagtcatcttattctcgatcctcagctgttaagtattctggatccaaaagccctgggccctctcgacgcagccagatttctgctcatggcagatcttcttccaatgtaaacggtggacctgagcttgaccgttgcataagtcctgaaggtgtgaatggaaacagatgctctgaatcatcaactcttcttgagaaatacaaaattggaaaggtcattggtgatggcaattttgcagtagtcaaagagtgtatagacaggtccactggaaaggagtttgccctaaagattatagacaaagccaaatgttgtggaaaggaacacctgattgagaatgaagtgtcaatactgcgccgagtgaaacatcccaatatcattatgctggtcgaggagatggaaacagcaactgagctctttctggtgatggaattggtcaaaggtggagatctctttgatgcaattacttcgtcgaccaagtacactgagagagatggcagtgccatggtgtacaacttagccaatgccctcaggtatctccatggcctcagcatcgtgcacagagacatcaaaccagagaatctcttggtgtgtgaatatcctgatggaaccaagtctttgaaactgggagactttgggcttgcgactgtggtagaaggccctttatacacagtctgtggcacacccacttatgtggctccaraaatcattgctgaaactggctatggcctgaaggtggacatttgggcagctggtgtgatcacatacatacttctctgtggattcccaccattccgaagtgagaacaatctccaggaagatctcttcgaccagatcttggctgggaagctggagtttccggccccctactgggataacatcacggactctgccaaggaattaatcagtcaaatgcttcaggtaaatgttgaagctcggtgtaccgcgggacaaatcctgagtcacccctgggtgtcagatgatgcctcccaggagaataacatgcaagctgaggtgacaggtaaactaaaacagcactttaataatgcgctccccaaacagaacagcactaccaccggggtctccgtcatcatggtgagtggaaggcggcaggtctggcctgactgcggagccggccttgaagtttttgaattaggtagccgggagctgccctcacatggaagttggtgccttccgtagtcctatttcatatgaagattggcttggcatgtggagggcactcattcggcaactcccaggctttgggcactgtgtggaggggcttgtgtagggaccagcaggcctggtgtgaggggtccaggcgtcaaggagctcctggctgggccctctgggcagctgcttccactcttgtctctgccttctcatctagagagactcccaagccctggaggggtgtgttgtgttaggaattaactccctgcctaccccaaggcctcagaaatagattattagagatgtgaattattctttgagacttgggataagaaacagccaaagctaaacatatttcagttttaaaaaatcagtgttttataaaacacagtttggggcttttaaaggtacataatcaaggaaaaaaatatatattcatttttcagggttggtaacattttatgagatgtcagtgacaacgatggccttatttttttcagccttttcttcttccaaaatgtttcttaaggcaactctcctaaatacataaacacaacaaattaaaatgaaaagtgacatgagagtaaatgaatcaaaaggaaaaaacattgaaccagaggtgagggcagcacacccgcagcagctgtccaggcctgagccaatgcaaccctgggcgggaaggccagctcaccgtgagcaggtagaagccagccagccacccaggcagggaccttggttctccccacacactcccaggagcagggaacaggggtggagtggcctttcccagagctggagttggctgcagcagctttcgaatcagacctgccaaggtgatgggcgtctgagtttcacatctgggccccccgtgaccccactgagtcctgacagctaaggatgggccacctccacagctccgtcactcgtacttgggacaggcctctcatcctctgggaaggtcctccttgtttcctacccaactagaagggaaacagtggcatattctcatggtacatggttgtctgaaagccttacctaggaagacgcagggtctagatagaagctataaggaagccacacacataacccacatccccacacccccaacatcccccacactccccacaccccccacaccccccacatccccaccataattacccccacctccaaatatctcat

SEQ ID NO: 25 - DNA, 1248 bp, Murine sp.
accaagtcctccagctcctctccaaccagcccgggaagtttcagaggattgaagatttctgctcagggcagatcttcttccaacgtaaacggtgggcctgaacttgaccgttgcctgagccctgaaggtgtgaatggaaaccggtgctccgagtcgttcccccttctggagaaatacagaatagggaaggtcatcggggacggcaacttcgcggtagttaaggagtgcgtggacaggtacactggaaaagagtttgcattaaagattatagacaaagccaaatgctgtggaaaggagcatctgattgagaacgaagtgtcaatcctgcgccgagtgaagcaccccaacatcatcatgttggttgaagagatggaaacagcaactgacctctttctagtgatggaactggtcaaaggtggagatctctttgatgcgattacctcttcaaccaagtacactgagagagatggaagcgccatggtgtacaacctagccaatgccctccggtacctgcacagcctcagcatcgtccacagggacatcaagcctgagaatctgctggtgtgcgaatacccagatggaaccaagtctttgaagctgggagactttgggctggcgacggtggttgaaggcccgttgtacacggtctgtggcacgccaacttatgtggcaccagagatcatagctgaaacaggttatggcctgaaggtggatgtttgggcagctggtgtgattacatacatacttctctgtggattcccaccattccggagtgagaacaatctccaggaagatctctttgaccagatcttggctggaaagctggaattcccagccccctactgggacaacattacagactctccttgtgtgtgttttaggaaatgcttatgaagctggcccgtgggcttcccagtgggacgtgcagcagttcttggcagagcagggccagctctgctgtgtcatctccagggtctcccatcacctctgctctttgccatggcaggtctgctgagaccccgcggggacgggggcatggtgctccctgattggcctgtgaccaaccttctggaaggctgctggcagttttccctgttttccaccaccccactctttttaataattgtatataactgtacttgttctacttgcttgtctttaaaacaggggcccccacagttcactctcactgttagattttgccttttccaggtatccccaacctgcaataaactcttccctcttcag

SEQ ID NO: 26 - DNA, 2422 bp, Homo sapiens
ccagcagccaagagggtagtggtgtaccggaatggggacccattcttcccaggctcccagctggtggtgactcaacgccgcttccccaccatggaggccttcctctgcgaggtgacatcagctgtgcaggccccactggctgtgcgtgccctctacacaccttgtcatggccaccctgtcaccaacctggcagacttgaagaacagagggcagtatgtggccgctggatttgaacgattccacaagctccccccttaccaggctttttgtctcagtgtgttcaggaatggggacctggtaagtcccccatttagtctgaagctgtcccaggctgccagccaggactgggaaactgtgttgaagctcctgactgagaaggtcaagttgcagagtggggctgtgagactctgcaccctagaggggctcccactgtcagcagggaaggagctggtaactggccattactatgtggctgtcggagaggatgagttcaaggaccttccctatccagctctgtccacaagagggctcctggcagcaggcaatgaagcccacctgaggagtggagtggggactgtcgctggttcccccaagcctcttggaaggaaggctaagaaggagacatgcctaatcgtgaccctgaccctgaaataccagcagtcagaaacaagcagagacgggcaatcattcccatcaggagttataggagtatatggagctccccaccgaaggaaggagacagcgggggccctggaagtagcagatgatgaagacactcagacagaggagcccttggatcagagggcagcacagatagtggaacaggttacttgtctgcaagacttttttggtgatgacgatgtttttattgcatgtggaccagaaaaatttcgttatgcccaagatgactttgtcctggatcatagtcgtcgacggctcctgagagagcaccaggcgggctttgagaagctccgcaggacccgaggagaagagaaggaggcagagaaggagaaaaagccatgtatgtctggaggcagaaggatgactctcagagatgaccaacctgcaaagctagaaaaggagcccaagacgaggccagaagagaacaagccagagcggcccagcggtcggaagccacggcccatgggcatcattgccgccaatgtggaaaagcattatgagactggccgggtcattggggatgggaactttgctgtcgtgaaggagtgcagacaccgcgagaccaggcaggcctatgcgatgaagatcattgacaagtccagactcaagggcaaggaggacatggtggacagtgagatcttgatcatccagagcctctctcaccccaacatcgtgaaattgcatgaagtctacgaaacagacatggaaatctacctgatcctggagtacgtgcagggaggagacctttttgacgccatcatagaaagtgtgaagttcccggagcccgatgctgccctcatgatcatggacttatgcaaagccctcgtccacatgcacgacaagagcattgtccaccgggacctcaagccggaaaaccttttggttcagcgaaatgaggacaaatctactaccttgaaattggctgattttggacttgcaaagcatgtggtgagacctatatttactgtgtgtgggaccccaacttacgtagctcccgaaattctttctgagaaaggttatggactggaggtggacatgtgggctgctggcgtgatcctctatatcctgctgtgtggctttcccccattccgcagccctgagaggggaccaggacgagctctttaacatcatccagctgggccactttgagttcctccccccttactgggacaatatctctgatgctgctaaagatctggtgagccggttgctggtggtagaccccaaaaagcgctacacagctcatcaggttcttcagcacccctggatcgaaacagctggcaagaccaatacagtgaaacgacagaagcaggtgtcccccagcagcgatggtcacttccggagccagcacaagagggttgtggagcaggtatcatagtcaccaccttgggaatctgtccagcccccagttctgctcaaggacagagaaaaggatagaagtttgagagaaaaacaatgaaagaggcttcttcacataattggtgaatcagagggagagacactgagtatattttaaagcatattaaaaaaattaagtcaatgttaaatgtcacaacatatttttagatttgtatatttaaagcctttaatacatttttggggggtaagcattgtcatcagtgaggaattttggtaataatgatgtgttttgcttcccctttgtaaccaagtttattctgtactacaggagtggtgcttaccagggtctaaactccccctgtgagattaataaggtgcattg

SEQ ID NO: 27 - skipped

SEQ ID NO: 28 - DNA, 2421 bp, Murine sp.
atgccaaccgcgccggtcctgcgcccgccgccgccgccagcgacccccgccccgccggcacccagtcgccctgcgcctcccattccgggccaccgaggcccatgtgaccattctctgaaatgcttaagctcgaagatctctgagagaaagctgccaggcccctggttacctgcgggacgaggacctctggagaagccagttctggggccacgtggtgccgtcatgccgctgttcagccctcagagcagcctccactcagtccgcgcagagcacagcccactgaagcccagggtggtgacggtggtgaagctgggtgggcagcccctccgtaaggccaccctgctcctcaaccggcgctcagtgcagacctttgagcagctcctatcagacatctccgaagccttgggcttcccacgctggaagaacgaccgtgtgcggaagctgttcaccctcaagggcagggaggtgaagagtgtgtctgacttcttccgggagggtgatgctttcatagctatgggcaaagagccgctgacattgaagagtatccagttggccatggaggagctgtatcctaagaaccgggctcttgccctggcccctcacagtagagtcccctccccaaggctgagaagcagacttcccagcaagcttctgaaaggaagtcaccgctgtggggaggcaggaagctatagcgcggaaatggagagtaaggcagtctctaggcatcagggcaagacttccacagtgctggccccagaagacaaggcgagggcccagaagtgggtaagagggaaacaggagtcagaacctggtggcccgccttcacccggggcagccactcaggaggagactcatgcaagtggagagaaacatctgggggtggagatcgaaaagacctccggggagattgtcagatgtgagaagtgtaagagagaaagagagctgcagttgggcctgcagagggagccgtgcccgctgggaaccagtgagctggacctggggagagctcagaagagggattccgagaagttggtgaggaccaagagctgcaggaggccttctaaggcaaaatttacagatggagaggaagggtggaagggtgacagccatcggggcagtcccagggacccccctcaggaaatgaggaggcccaacagcaactcagacaagaaagagatcagaggctcagaaagtcaggacagttatcctcagggggcacccaaggcccagaaggacttcgtggaagggccaccagctgtagaggaggggccgatagacatgaggagagaggaccggcacacatgcaggagcaagcatgccgcctggctccggagagagcagcaggccgaacccccacagctccccagaacccgaggggaggagaagcaagcagagcacgagaagaagccaggcggcttaggagagaggagggcgccagagaaggagtctaagaggaagctagaagagaagaggccagaacgacccagtggccggaagccgaggcccaagggcatcatctcagcggatgtggagaagcactatgacataggtggggtcattggggatggcaactttgccaccgtgaaggaatgcaggcaccgagagaccaagcaggcttacgccatgaagatgattgacaagtcccagctgaagggtaaggaggacattgtcgacagtgagattttaatcatccagagtctctctcatcccaacattgtgaaactgcatgaggtctacgaaacggaggcggagatctacctgatcatggagtatgtgcagggaggggacctttttgatgccatcgttgaaaatgtgaagtttccagagcccgaggctgcagttatgatcacagacttgtgtaaggccttcgtccacatgcacgacaagaatatcgtccaccgggacgtgaaaccagaaaacctcctggttcagcgaaatgaagacaagtctatcaccttgaagctggctgattttggcttggccaaatatgtggtgaggcctatatttactgtgtgtgggacgccaacatatgtagctcctgaaattctttctgagaaaggttacggcctggaggtggacatgtgggcggcaggtgtgatcctatacatcctcttgtgtggcttcccccctttccgaagtcctgagagggaccaagacgagctcttcaacatcatccaagtgggccagtttgagttcctctctccttactgggacaacatttctgatgctgccaaagatctggtgagaaatttgctggaggtggaccctaagaagcggtacacggccgaacaggtcctacagcatccctggattgagatggttgggcataccaacacagggaactcacagaaggaggagtcccccaacagtttaggtcacttccagagtcagcacaagaaggttgcagagcagatgccataa

SEQ ID NO: 29 - DNA, 1627 bp, Homo sapiens
ctccgctgctgtcgccaggagtcacttcacgagaagccaggtcacaaccgtcggcccttgtctggaaaagtaaaagtggatcctgccacgttcggagctccctggcgcctcgcccggctggagctagagaactcgtcctgtggcggcccccggcgtggggcgggacagcggccccctggagggggcagtcccgggagaacctgcggcggccggagcggtaaaaataagtgactaaagaagcagacctgggaatcacctaacatgtcgaggaggagatttgattgccgaagtatttcaggcctactaactacaactcctcaaattccaataaaaatggaaaactttaataatttctatatacttacatctaaagagctagggagaggaaaatttgctgtggttagacaatgtatatcaaaatctactggccaagaatatgctgcaaaatttctaaaaaagagaagaagaggacaggattgtcgggcagaaattttacacgagattgctgtgcttgaattggcaaagtcttgtccccgtgttattaatcttcatgaggtctatgaaaatacaagtgaaatcattttgatattggaatatgctgcaggtggagaaattttcagcctgtgtttacctgagttggctgaaatggtttctgaaaatgatgttatcagactcattaaacaaatacttgaaggagtttattatctacatcagaataacattgtacaccttgatttaaagccacagaatatattactgagcagcatataccctctcggggacattaaaatagtagattttggaatgtctcgaaaaatagggcatgcgtgtgaacttcgggaaatcatgggaacaccagaatatttagctccagaaatcctgaactatgatcccattaccacagcaacagatatgtggaatattggtataatagcatatatgttgttaactcacacatcaccatttgtgggagaagataatcaagaaacatacctcaatatttctcaagttaatgtagattattcggaagaaactttttcatcagtttcacagctggccacagactttattcagagccttttagtaaaaaatccagagaaaagaccaacagcagagatatgcctttctcattcttggctacagcagtgggactttgaaaacttgtttcaccctgaagaaacttccagttcctctcaaactcaggatcattctgtaaggtcctctgaagacaagacttctaaatcctcctgtaatggaacctgtggtgatagagaagacaaagagaatatcccagaggatagcagcatggtttccaaaagatttcgtttcgatgactcattacccaatccccatgaacttgtttcagatttgctctgttagcacttttttctttgactcatttggactgaatttgaaattttatatccactccagtgagattatgatttgtagcttcatatatgacatgtttatattgtaaatgcacttttccatggaataatttagggaagtgttttaatgttaaattactagttgctagcatgttatgatttcatatcctgagatagctctgcagataagaaaatatttaaatatatgacaaaaagtaaaattgtacatgtgaaag

SEQ ID NO: 30 - DNA, 2671 bp, Murine sp.
ccagacgcggctgcacttttcaaacctcaactgtaagaagcgtcggtcagcgtctgtgcggtcgccgccgggagtcgcctcacaggggcctggctgacggcgaccagccgttgtggggaagagtgcgaggtaaaagtctgcctagagaagcaggtctggcagtcatcaacatgtctcggaggagattcgattgccgaagtgtctcaggcttgctaactacaacccctcaaacgccgattaaaacagagaattttaataatttctatactcttaccccaaaagaacttgggagaggaaaatttgctgtggttagacaatgtatatcaaaatcaactggacaagagtatgctgccaaatccctgaaaaagaggagaagagggcaggattgccgggcggaaattctgcatgagatagctgtgctggagctggccaggtcttgtccccacgtgattaatctgcatgaggtctacgaaaatgcaacggaaatcattttggtgttagaatatgctgcgggtggagaaattttcaacctgtgtttacctgagttagccgaaatggtatctgaaaatgatgttatcagactcattaaacaaatccttgaaggagttcattatctacatcagaataacattgttcaccttgatttaaagccacagaatatacttttgagcagtatatacccactcggggacataaaaattgtagattttggaatgtctcgaaaaattgggaatgcaagtgagcttcgggaaatcatgggaacacctgaatacttagctccagaaatcctcaactatgatcccattaccacagcaacagatatgtggaatattggcataatagcgtatatgttgttaactcatacatcaccatttgtaggagaagataatcaagaaacatatctgaatatttctcaagtgaatgtagattattcagaagaaatgttttcatcagtttcacagctggccacagacttcatccagagccttctagtaaagaacccagagaaaagaccaacagcagaatcctgcctatcccactcatggctgcagcagtgggactttggaagcttgtttcatcctgaggaaacttcaggctcctctcaaattcaggatctgactctcaggtcctctgaagagaagacctccaagtcctcctgtaatgggagctgtggagcccgggaggacaaggagaacatccctgaagatggcagcttagtttctaaaagatttcgattcgatgactccttgcccagcccccatgaacttgttccagatttgttctgttagcatttttctctgtgactcatctggactgactcggaaatttgaaatctctggtgtgagattgtgtttgtagcttcatatattatgtttatattataaatgcacttctgcttagaagaacttaaggaacagtttaaatgctaggcttctgttggctagcatatcatttcttgtcctgaaattgttttgcagaggaaaatatttaagtatatgacaaaaaatgtaaattgtgtttaagagaacacatgcaactgaaagaactcaagttcagtcagacttataaaatgggttatattatggttagtaaaagttgaaaaaaaatgaaaacaggaatttagtaggttctaaggtaagccctataccataactctattacagagaatctgtttggggaaatgctgtcaagggtaaaccacaacatatactgctttataaatactccagagagagtttatagttgaaagtatttcccagttaccaataatagcttgaaactgtaagattttctttgtgtgccatgtgctcggtgagaggacacagtcaaccagagcagggttgatccaggctgtttctctgcaaaccgagtcaaaactcgacatcatttccagctcatgtattttgtacgtgcatcatatatcagatctaataagatctggaagatggatatgcaaataagaggcctttgtcttctagaatgattagagtagaggagaattggatagtacagaatatgctctagtttcagtcagacatattcataaagggaaatgttaagttctggcagctgacttagtgttggatgtctcctaagtctcaggatagaagcccatcattagagcataggcacttcaggaattcttgtgtgaaattctagtgagtgaggaggtgtgacatgcagctatctttgggctccttttgtgtgtgttctgctggacacaacacatgggagtgttcagtgttgtccgtggtcaatatctatgttcagtcctgatgggaggggcctagggactgctttggagatttcccactggtgtccattttaaggtctgtaataatgtcatgttaagataacagatctcataaatatgctactctatcagactccgttgccaaaacaaattaaaagcctgtgtattgaagtgggtgttagtctaacaacctgtaaattcttgaaattgttactaaaattccaaattctttagataactttaaactatttaaattgagcattgctgtctttgtttgattaaaggttgagttcctttatatctgttatttttaaaggaaaagttgtttgccttttgtatatgtgtgtgcatatgtgtatgtgtacaggtatatgtatatatgtattgatagataaaatacagcctttaaacaacttc

SEQ ID NO: 31 - DNA, 1245 bp, Homo sapiens
atgatccctttggagaagccaggcagcggcggctcctccccaggcgccacctcaggctcgggccgggcaggccggggtctgagcgggccgtgccggccgccgccgccgccccaggcccgcgggctgctgacagagatacgcgccgtggtgcgcaccgagcccttccaggacggctacagcctgtgcccgggccgggagctgggcagggggaaatttgcagtggtgagaaaatgtataaagaaagattctgggaaagaatttgctgcaaagttcatgagaaaaagaagaaaaggccaagattgtcggatggaaataattcatgagattgctgtacttgaactagcacaagacaatccttgggtcattaatttacatgaagtttatgagactgcatcagaaatgatcttagttctggaatatgctgctgggggtgaaatctttgaccagtgtgttgcagacagagaagaagcctttaaagaaaaagatgttcaaagacttatgcgacagattttagaaggtgttcactttttacacactcgtgatgtagttcatcttgatttgaagcctcagaatattctgttgacaagtgaatctccattgggtgacattaagattgttgattttggcctttcaagaatattgaagaacagtgaagagctccgagaaattatgggtacccctgaatatgtggctcctgaaattcttagttatgatcctataagcatggcaacagatatgtggagcattggagtgttaacatatgtcatgcttacaggaatatcacctttcttaggcaatgataaacaagaaacattcttaaacatctcacagatgaatttaagttattctgaggaagaatttgatgttttgtctgagtcggctgttgatttcatcaggacacttttagttaagaaacctgaagatcgagccactgctgaagaatgtctaaagcacccctggttgacacagagcagtattcaagagccttctttcaggatggaaaaggcactagaagaagcaaatgccctccaagaaggtcattctgtgcctgaaattaattcggataccgacaaatcagaaaccgaggaatccattgtaaccgaagagttaattgtagttacttcatatactctaggacaatgcagacagtctgaaaaagagaaaatggagcaaaaggccatttccaaacgatttaaatttgaggaacctttgctacaagaaattccaggagaatttatctactga

SEQ ID NO: 32 - DNA, 4321 bp, Homo sapiens
cggggctgccggggccgggactgggggagccgggcccgcgggccgcctgctgcctccgcccgcgccggggtccccagccgcccccgctgccgtgtcccctgcggccggccagccgcgtcccccagccccggcctcccgcggacccatgcccgcccgtatcggctactacgagatcgaccgcaccatcggcaagggcaacttcgcggtggtcaagcgggccacgcacctcgtcaccaaggccaaggttgctatcaagatcatagataagacccagctggatgaagaaaacttgaagaagattttccgggaagttcaaattatgaagatgctttgccacccccatatcatcaggctctaccaggttatggagacagaacggatgatttatctggtgacagaatatgctagtggaggggaaatatttgaccacctggtggcccatggtagaatggcagaaaaggaggcacgtcggaagttcaaacagatcgtcacagctgtctatttttgtcactgtcggaacattgttcatcgtgatttaaaagctgaaaatttacttctggatgccaatctgaatatcaaaatagcagattttggtttcagtaacctcttcactcctgggcagctgctgaagacctggtgtggcagccctccctatgctgcacctgaactctttgaaggaaaagaatatgatgggcccaaagtggacatctggagccttggagttgtcctctacgtgcttgtgtgcggtgccctgccatttgatggaagcacactgcagaatctgcgggcccgcgtgctgagtggaaagttccgcatcccattttttatgtccacagaatgtgagcatttgatccgccatatgttggtgttagatcccaataagcgcctctccatggagcagatctgcaagcacaagtggatgaagctaggggacgccgatcccaactttgacaggttaatagctgaatgccaacaactaaaggaagaaagacaggtggaccccctgaatgaggatgtcctcttggccatggaggacatgggactggacaaagaacagacactgcagtcattaagatcagatgcctatgatcactatagtgcaatctacagcctgctgtgtgatcgacataagagacataaaaccctgcgtctcggagcacttcctagcatgccccgagccctggcctttcaagcaccagtcaatatccaggcggagcaggcaggtactgctatgaacatcagcgttccccaggtgcagctgatcaacccagagaaccaaattgtggagccggatgggacactgaatttggacagtgatgagggtgaagagccttcccctgaagcattggtgcgctatttgtcaatgaggaggcacacagtgggtgtggctgacccacgcacggaagttatggaagatctgcagaagctcctacctggctttcctggagtcaacccccaggctccattcctgcaggtggcccctaatgtgaacttcatgcacaacctgttgcctatgcaaaacttgcaaccaaccgggcaacttgagtacaaggagcagtctctcctacagccgcccacgctacagctgttgaatggaatgggcccccttggccggagggcatcagatggaggagccaacatccaactgcatgcccagcagctgctgaagcgcccacggggaccctctccgcttgtcaccatgacaccagcagtgccagcagttacccctgtggacgaggagagctcagacggggagccagaccaggaagctgtgcagaggtacttggcaaataggtccaaaagacatacactggccatgaccaaccctacagctgagatcccaccggacctacaacggcagctaggacagcagcctttccgttcccgggtctggcctcctcacctggtacctgatcagcatcgctctacctacaaggactccaacactctgcacctccctacggagcgtttctcccctgtgcgccggttctcagatggggctgcgagcatccaggccttcaaagctcacctggaaaaaatgggcaacaacagcagcatcaaacagctgcagcaggagtgtgagcagctgcagaagatgtacggggggcagattgatgaaagaaccctggagaagacccagcagcagcatatgttataccagcaggagcagcaccatcaaattctccagcaacaaattcaagactctatctgtcctcctcagccatctccacctcttcaggctgcatgtgaaaatcagccagccctccttacccatcagctccagaggttaaggattcagccttcaagcccaccccccaaccaccccaacaaccatctcttcaggcagcccagtaatagtcctccccccatgagcagtgccatgatccagcctcacggggctgcatcttcttcccagtttcaaggcttaccttcccgcagtgcaatctttcagcagcaacctgagaactgttcctctcctcccaacgtggcactaacctgcttgggtatgcagcagcctgctcagtcacagcaggtcaccatccaagtccaagagcctgttgacatgctcagcaacatgccaggcacagctgcaggctccagtgggcgcggcatctccatcagccccagtgctggtcagatgcagatgcagcaccgtaccaacctgatggccaccctcagctatgggcaccgtcccttgtccaagcagctgagtgctgacagtgcagaggctcacagcttgaacgtgaatcggttctcccctgctaactacgaccaggcgcatttacacccccatctgttttcggaccagtcccggggttcccccagcagctacagcccttcaacaggagtggggttctctccaacccaagccctgaaagtccctccacttgaccaattccccaccttccctcccagtgcacatcagcagccgccacactataccacgtcggcactacagcaggccctgctgtctcccacgccgccagactatacaagacaccagcaggtaccccacatccttcaaggactgctttctccccggcattcgctcaccggccactcggacatccggctgcccccaacagagtttgcacagctcattaaaaggcagcagcaacaacggcagcagcagcagcaacagcagcaacagcaagaataccaggaactgttcaggcacatgaaccaaggggatgcggggagtctggctcccagccttgggggacagagcatgacagagcgccaggctttatcttatcaaaatgctgactcttatcaccatcacaccagcccccagcatctgctacaaatcagggcacaagaatgtgtctcacaggcttcctcacccaccccgccccacgggtatgctcaccagccggcactgatgcattcagagagcatggaggaggactgctcgtgtgagggggccaaggatggcttccaagacagtaagagttcaagtacattgaccaaaggttgccatgacagccctctgctcttgagtaccggtggacctggggaccctgaatctttgctaggaactgtgagtcatgcccaagaattggggatacatccctatggtcatcagccaactgctgcattcagtaaaaataaggtgcccagcagagagcctgtcatagggaactgcatggatagaagttctccaggacaagcagtggagctgccggatcacaatgggctcgggtacccagcacgcccctccgtccatgagcaccacaggccccgggccctccagagacaccacacgatccagaacagcgacgatgcttatgtacagctggataacttgccaggaatgagtctcgtggctgggaaagcacttagctctgcccggatgtcggatgcagttctcagtcagtcttcgctcatgggcagccagcagtttcaggatggggaaaatgaggaatgtggggcaagcctgggaggtcatgagcacccagacctgagtgatggcagccagcatttaaactcctcttgctatccatctacgtgtattacagacattctgctcagctacaagcaccccgaagtctccttcagcatggagcaggcaggcgtgtaacaagaaacagagagttttgtgtacagcttgggaatgaaaaggttgattgtaaacccacagtatctagcagcgttgtgccaaattgcccttgtgtttctctccacccaaaatatcacagctgctttcctcacatttggttcatccgtgtgctgttcttttgggttctgagagggttttgccatgtttgcttgtatgaccaagtcaccaaggaaataaacaggaaggaaatccatgttctcc

SEQ ID NO: 33 - DNA, 2311 bp, Homo sapiens
ctgggccgctgccggtcaggtcggccgcccctgacagctccgggagcctcaagcgcgacagggcgccctcacctcgggacatccacacaccgaccgctcctgctccagaggcaacaacccagcgcgcctagcctggcgccgtgcagcgaagcccaagagctggcctcgccacgaaggttgaaccagccaaattttcgagacagctcacggcttagaggaaggttcatctaaataaaggccggctaaagtgacattgcagggattaaatccttctttggctgcctgtgtgaccagaaggcttatttgcaagtttcttctttcctggggtccagattattaggtctccagcgccctgcagcttgacagaaagagaagcatgaaatgaaggtcagagatgagatcccgcagcagggacgtgggggcctcccaggggcatttacgcaccagagtgcaagattctctggccatcaagggaaatagcaaacagaagcctttgtcctggggcacagccacctaccacaaagcatcagactccacgtctggccagaaagttcctggagtcccatcaggccagtgggtatgtaacatgtgcctaattgtacagctagagcctgcaagttcaacgtgagggaaggtgggaaatgtcttgagtgaggcgagcagctcctggctgggctgggcagactcagctaccacgttcactgccttcctctcactaaagccgagagggaggctgctcagctctcaggaaaactcttttgaaccctgggcacctgctgtcctcagttggcatctcccaccctctgagcctcttctgctcctgcacaacctgcctcttcgctgagatggagacgtgagcccccgtggacgatgactgcagtgtatatgaatggaggtggcctggtgaacccccactatgcccggtgggatcggcgcgacagtgtagaaagtggctgtcagaccgagagtagcaaggagggtgaggagggacagccccgccagctgacgcccttcgagaaactgacacaggacatgtcccaggatgagaaggtggtgagggagatcacgctggggaaacggataggcttctaccgaattcgaggggaaatcggaagtggaaacttctcccaagtgaagcttgggattcactccctaaccaaagaaaaggtggccattaagatcctggacaagaccaagttagaccagaaaacccagaggctactatcccgagaaatctccagcatggaaaagctgcaccatcccaacatcatccgcctttacgaagtggtggagaccctatccaagctgcacttggtgatggagtatgcagggggtggggagctcttcggaaaaattagcactgaggggaagctctctgaaccagaaagcaagctcatcttctcccagattgtgtctgccgtgaagcacatgcatgaaaaccaaattattcatagagatctgaaagcagaaaatgtattctataccagtaatacttgtgtgaaggtgggcgattttggattcagcacagtaagcaaaaaaggtgaaatgctgaacactttctgtgggtctcctccctacgctgcgcctgaactcttccgggacgagcactacatcggcatttacgtggatatctgggccttgggggtgcttttgtacttcatggtgactggcaccatgccatttcgggcagaaaccgtggccaaactaaaaaagagcatcctcgagggcacatacagtgtaccgccgcacgtgtcagagccctgccaccgactcatccgaggagtccttcagcagatccccacggagaggtacggaatcgactgcatcatgaatgatgaatggatgcaaggggtgccataccctacacctttggaacctttccaactggatcccaaacatttgtcggaaaccagcactctcaaggaagaagaaaatgaggtcaaaagcactttagaacatttgggcattacagaagagcatattcgaaataaccaagggagagatgctcgcagctcaatcacaggggtctatagaattattttacatagagtccaaaggaagaaggctttggaaagtgtcccagtcatgatgctaccagaccctaaagaaagagacctcaaaaaagggtcccgtgtctacagagggataagacacacatccaaattttgctcgattttataaattgcactagactgcttgtaactaaccaagatgattgttgctgcttctaaatttttttcaaggacaacttgagtggagacatttttgtaatttttaaataaacttaaatttgagatatgcaaaaaaaaaa

SEQ ID NO: 34 - DNA, 2190 bp, Homo sapiens
atgtccactaggaccccattgccaacggtgaatgaacgagacactgaaaaccacacgtcacatggagatgggcgtcaagaagttacctctcgtaccagccgctcaggagctcggtgtagaaactctatagcctcctgtgcagatgaacaacctcacatcggaaactacagactgttgaaaacaatcggcaaggggaattttgcaaaagtaaaattggcaagacatatccttacaggcagagaggttgcaataaaaataattgacaaaactcagttgaatccaacaagtctacaaaagctcttcagagaagtaagaataatgaagattttaaatcatcccaatatagtgaagttattcgaagtcattgaaactgaaaaaacactctacctaatcatggaatatgcaagtggaggtgaagtatttgactatttggttgcacatggcaggatgaaggaaaaagaagcaagatctaaatttagacagattgtgtctgcagttcaatactgccatcagaaacggatcgtacatcgagacctcaaggctgaaaatctattgttagatgccgatatgaacattaaaatagcagatttcggttttagcaatgaatttactgttggcggtaaactcgacacgttttgtggcagtcctccatacgcagcacctgagctcttccagggcaagaaatatgacgggccagaagtggatgtgtggagtctgggggtcattttatacacactagtcagtggctcacttccctttgatgggcaaaacctaaaggaactgagagagagagtattaagagggaaatacagaattcccttctacatgtctacagactgtgaaaaccttctcaaacgtttcctggtgctaaatccaattaaacgcggcactctagagcaaatcatgaaggacaggtggatcaatgcagggcatgaagaagatgaactcaaaccatttgttgaaccagagctagacatctcagaccaaaaaagaatagatattatggtgggaatgggatattcacaagaagaaattcaagaatctcttagtaagatgaaatacgatgaaatcacagctacatatttgttattggggagaaaatcttcagagctggatgctagtgattccagttctagcagcaatctttcacttgctaaggttaggccgagcagtgatctcaacaacagtactggccagtctcctcaccacaaagtgcagagaagtgtttcttcaagccaaaagcaaagacgctacagtgaccatgctggaccagctattccttctgttgtggcgtatccgaaaaggagtcagacaagcactgcagatggtgacctcaaagaagatggaatttcctcccggaaatcaagtggcagtgctgttggaggaaagggaattgctccagccagtcccatgcttgggaatgcaagtaatcctaataaggcggatattcctgaacgcaagaaaagctccactgtccctagtagtaacacagcatctggtggaatgacacgacgaaatacttatgtttgcagtgagagaactacagctgatagacactcagtgattcagaatggcaaagaaaacagcactattcctgatcagagaactccagttgcttcaacacacagtatcagtagtgcagccaccccagatcgaatccgcttcccaagaggcactgccagtcgtagcactttccacggccagccccgggaacggcgaaccgcaacatataatggccctcctgcctctcccagcctgtcccatgaagccacaccattgtcccagactcgaagccgaggctccactaatctctttagtaaattaacttcaaaactcacaaggagtcgcaatgtatctgctgagcaaaaagatgaaaacaaagaagcaaagcctcgatccctacgcttcacctggagcatgaaaaccactagttcaatggatcccggggacatgatgcgggaaatccgcaaagtgttggacgccaataactgcgactatgagcagagggagcgcttcttgctcttctgcgtccacggagatgggcacgcggagaacctcgtgcagtgggaaatggaagtgtgcaagctgccaagactgtctctgaacggggtccggtttaagcggatatcggggacatccatagccttcaaaaatattgcttccaaaattgccaatgagctaaagctgtaa

SEQ ID NO: 35 - DNA, 1594 bp, Murine sp.
aaagggccgtcctggtccagccgttccctgggtgcccgttgccggaactctatcgcttcctgccctgaggaacaaccccatgtgggcaactataggctgctaaggaccatcgggaagggcaacttcgccaaagtcaagctggctcggcatatcctcacgggccgggaggtcgctattaagatcattgataagacccagctgaaccccagtagcttgcagaagctgttcagagaagtccgaattatgaagggactcaaccaccccaacatcgtgaagctttttgaggtgatagagacggagaagacgctatacctggtgatggaatacgctagcgcaggagaagtgtttgactacctcgtgtcgcacggccgcatgaaggagaaggaggctcgagccaagttccggcagatcgtgtcagccgtgcactactgtcatcagaagaacattgtacacagggatctaaaggctgaaaacctgttgctggatgccgaggccaacatcaaaatcgccgacttcggcttcagcaatgagttcacgctgggctccaagctggacaccttctgtgggagccccccatacgccgccccagagctgttccagggcaagaagtatgatgggccagaggtggacatctggagcctgggtgtcatcctgtacacgctggtcagcggctccctgcccttcgatgggcacaacctcaaggagctgcgggagcgagtcctcagaggaaagtaccgggtccccttctacatgtctacagactgcgagagcattctgcggagatttctggtgctgaaccccgcaaaacgctgtactctggagcaaatcatgaaagacaaatggatcaacatcggctatgagggtgaggagctgaagccagacacggagctcaaagaagagcggatgccgggtcggaaagcgagctgcagtgcagtgggcagtggaagtcgaggcttgcccccctccagccccatggtcagcagtgcccacaaccccaataaggcagagatccctgagcggcggaaggacagcactagcacccctaacaacctcccccccagcatgatgacccgaagaaacacctatgtgtgcacagagcgaccaggatctgaacgcccgtccttgttgccaaatggcaaagaaaatagctccggtacctcgcgggtgccccctgcctcgccttccagtcatagcctggctcccccgtcaggcgagcggagccgcctggctcggggctccaccatccgcagcaccttccatgggggccaggtccgagaccggcgggcagggagcgggagtggcgggggtgtgcagaatggacccccagcctcacccacgcttgcccacgaggccgcacccctgccctccgggcggcctcgccccaccaccaacctcttcaccaagctgacctccaaactgacccgaagggtcacagacgaacctgagagaatcgggggacctgaggtcacaagttgccatctaccttgggataaaacggaaaccgcccccaggctgctccgattcccctggagtgtgaagctgaccagctcgcgaccttcctgaggccctgatggctgccctgcgacaggccaca

SEQ ID NO: 36 - DNA, 4139 bp, Homo sapiens
gtagccggcttggcgtgaccgtcgcctgatccagttgttagaggtggaagcttggcagttggcctcccttcttcccatggaggtcgggggcttaacagtctttgaagaggaccagagatgcctttcccagagcctccccttgccagtgtcagcagagggcccagctgcacagaccactgctgagcccagcaggtcgttttcctcagcccacagacacctgagcagaaggaatgggctttccagactctgccagagcaggacggcgctctctgaagacagatggagctcctattgtctatcatcactggctgcccagaatatttgtacaagtaaactgcactgccctgctgcccctgagcacacggacccgtccgaaccgcggggcagtgtgtcctgctgctccctgctgcggggactgtcctcagggtggtcctcacctctgcttccggcccctgtgtgcaaccctaacaaggccatcttcacggtggatgccaagaccacagagatcctcgttgctaacgacaaagcttgcgggctcctggggtacagcagccaggacctgattggccagaagctcacgcagttctttctgaggtcagattctgatgtggtggaggccctcagcgaggagcacatggaggccgacggccacgctgcggtggtgtttggcacggtggtggacatcatcacccgtagtggggagaagattccagtgtctgtgtggatgaagaggatgcggcaggagcgccgcctatgctgcgtggtggtcctggagcccgtggagagggtctcgacctgggtcgctttccagagcgatggcaccatcacgtcatgtgacagtctctttgctcatcttcacgggtacgtgtctggggaggacgtggctgggcagcatatcacagacctgatcccttctgtgcagctccctccttctggccagcacatcccaaagaatctcaagattcagaggtctgttggaagagccagggacggtaccaccttccctctgagcttaaagctgaaatcccaacccagcagcgaggaggcgaccaccggtgaggcggcccctgtgagcggctaccgggcatctgtctgggtgttctgcaccatcagtggcctcatcaccctcctgccggatgggaccatccacggcatcaaccacagcttcgcgctgacactgtttggttacggaaagacggagctcctgggcaagaatatcactttcctgattcctggtttctacagctacatggaccttgcgtacaacagctcattacagctcccagacctggccagctgcctggacgtcggcaatgagagtgggtgtggggagagaaccttggacccgtggcagggccaggacccagctgaggggggccaggatccaaggattaatgtcgtgcttgctggtggccacgttgtgccccgagatgagatccggaagctgatggaaagccaagacatcttcaccgggactcagactgagctgattgctggaggccagctcctttcctgcctctcacctcagcctgctccaggggtggacaatgtcccagaaggaagcctgccagtgcacggtgaacaggcgctgcccaaggaccagcaaatcactgccttggggagagaggaacctgtggcaatagagagccccggacaggatcttctgggagaaagcaggtctgaaccagtggatgtgaagccatttgcttcctgcgaagattctgaagctccagtcccagctgaggatgggggcagtgatgctggcatgtgtggcctgtgtcagaaggcccagctagagcggatgggagtcagtggtcccagcggttcagacctttgggctggggctgccgtggccaagccccaggccaagggtcagctggcggggggcagcctcctgatgcactgcccttgctatgggagtgaatggggcttgtggtggcgaagccaggacttggcccccagcccctctgggatggcaggcctctcgtttgggacacctactctagatgagccgtggctgggagtggaaaacgaccgagaagagctgcagacctgcttgattaaggagcagctgtcccagttgagccttgcaggagccctggatgtcccccacgccgaactcgttccgacagagtgccaggctgtcaccgctcctgtgtcgtcctgcgatctgggaggcagagacctgtgcggtggctgcacgggcagctcctcagcctgctatgccttggccacggacctccctgggggcctggaagcagtggaggcccaggaggttgatgtgaattcgttttcctggaacctcaaggaactctttttcagtgaccagacagaccaaacgtcatcaaattgttcctgtgctacgtctgaactcagagagacaccctcttccttggcagtgggctccgatccagatgtaggcagtctccaggaacaggggtcgtgtgtcctggatgacagggagctgttactactgaccggcacctgtgttgaccttggccaaggccgacggttccgggagagctgtgtgggacatgatccaacagaaccgcttgaggtttgtttggtgtcctctgagcattatgcagcaagcgacagagaaagcccaggacacgttccttccacgttggatgctggccctgaggacacgtgcccatcagcagaggagccaaggctgaacgtccaggtcacctccacgcccgtgatcgtgatgcgcggggctgctggcctgcagcgggagatccaggagggtgcctactccgggagctgctaccatcgagatggcttacggctgagtatacagtttgaggtgaggcgggtggagctccagggccccacacctctgttctgctgctggctggtgaaagacctcctccacagccaacgcgactcagccgccaggacccgcctgttccttgccagcctgcccggctccacccactctaccgctgctgagctcaccggacccagcctggtggaagtgctcagagccagaccctggtttgaggagccccccaaggctgtggaactggaggggttggcggcctgtgagggcgagtactcccaaaagtacagtaccatgagcccgctgggcagtggggccttcggcttcgtgtggactgctgtggacaagggaaaaaacaaggaggtggtggtgaagtttattaagaaggagaaggtcttggaggattgttggattgaggatcccaaacttgggaaagttactttagagatcgcaattctatccagggtggagcacgccaatatcatcaaggtattggatatatttgaaaaccaagggttcttccagcttgtgatggagaagcacggctccggcctagacctcttcgctttcatcgaccgccaccccaggctggatgagcccctggcgagctacatcttccgacaagtgagagcaggccagagccgtctagtgtcagcagtgggatacctgcgcttgaaggacatcatccaccgtgacatcaaggatgagaacatcgtgatcgctgaggacttcacaatcaagctgatagactttggctcggccgcctacttggaaaggggaaaattattttatactttttgtgggaccatcgagtactgtgcaccggaagttctcatggggaatccctacagagggccggagctggagatgtggtctctgggagtcactctgtacacgctggtctttgaggagaaccccttctgtgagctggaggagaccgtggaggctgccatacacccgccatacctggtgtccaaagaactcatgagccttgtgtctgggctgctgcagccagtccctgagagacgcaccaccttggagaagctggtgacagacccgtgggtaacacagcctgtgaatcttgctgactatacatgggaagaggtgtttcgagtaaacaagccagaaagtggagttctgtccgctgcgagcctggagatggggaacaggagcctgagtgatgtggcccaggctcaggagctttgtgggggccccgttccaggcgaggctcctaatggccaaggctgtttgcatcccggggatccccgtctgctgaccagctaaacaccaatttcttcctgcttttctccacttggtttggaaaatcacacagttttcaggctccatctgtttg

SEQ ID NO: 37 - DNA, 1350 bp, Murine sp.
ccacgcgtccgcatccctgcttggatgagcccctggcgagtttcatctttcgacaactagtgtctgctgtaggatacctgcactcccaaggcatcatccatagagacatcaaggatgagaacattgtgattgctgaggacttcacaattaagctgatagattttggctcagctgcctacttagagaggggcaaactattttataccttttgtggaacaatcgaatactgtgcacctgaggttctcattggaaatccctacagagggccagagctggagatgtggtctctgggggtcaccctgtacacgctcatcttcgaggagaatcccttctgtgaggtggaggagaccatggaggcagttattcatcccccattcctggtttcccaagaacttatgagtcttctgtctggactgctgcagccttgccctgagcagcggaccactttggagaagctgatcagggacccctgggtgacacagcctgtgaaccttgctagctatacttgggaagaggtgtgtaggaccaaccagccagaaagtggcctgctgtcagctgcaagtctggagattgggagtaggagtccaagtgaaatggctcagagagagggtctctgtgggcctcctgctcccagggagactcgtggtgaccagcactgcttgcatcttaaggacccctctttgccagtcagctgagcaagctctcctgctctttggtttgggcagttgtatggatttcagggctttctacctggagaaaggaagttgtgaaggattgggatgacttctgcttctagattcctatgcaaatgctacaagagcctgcgatgctagttttcttaggtttatgatatagacttgtaattcatgtttttttataaccttgaaaatcattctaatgttcagttatactgtactattaaagggctttaagttgtaagcctcagaaagacacaaggagtgtttaagttctctatttttgttgtttgtttttgcttgtaagtttttgagacaggatctcaccatgtaactttggctggcctggaactcaactatgtagaccaggtagaccttaaactgacagatctgcctgcgcttgcctcccaagcattaggactgatggtgtgtgtcaccatgcccagttcttcctggttttgtgtgtaggtttctttcccactgacttggtacatgtgacatgtgacagatgtatggagtctatagaagtggccagacaaaaatggccagaatatttatttattttcttaaaaattttccaaattaaagctacttagttaacagttaaactggccaggactatatgagataaacttggttttctatttctttttgt

SEQ ID NO: 38 - DNA, 5163 bp, Homo sapiens
  modified_base (36): a, t, c, g, other or unknown
ggcacgaggcgcgcctggctgggccctgcggaggangggaaggagcgaaggagcgaaggagcaagcggagcgcagttcgcccaagccaagccgcgctgccaaccctcccgcccgcccgcgctcctgtccgccgtgtctagcagcggggcccagcatggtcatggcggatggcccgaggcacttgcagcgcgggccggtccgggtggggttctacgacatcgagggcacgctgggcaagggcaacttcgctgtggtgaagctggggcggcaccggatcaccaagacggaggtggcaataaaaataatcgataagtctcagctggatgcagtgaaccttgagaaaatctaccgagaagtacaaataatgaaaatgttagaccaccctcacataatcaaactttatcaggtaatggagaccaaaagtatgttgtaccttgtgacagaatatgccaaaaatggagaaatttttgactatcttgctaatcatggccggttaaatgagtctgaagccaggcgaaaattctggcaaatcctgtctgctgttgattattgtcatggtcggaagattgtgcaccgtgacctcaaagctgaaaatctcctgctggataacaacatgaatatcaaaatagcagatttcggttttggaaatttctttaaaagtggtgaactgctggcaacatggtgtggcagccccccttatgcagccccagaagtctttgaagggcagcagtatgaaggaccacagctggacatctggagtatgggagttgttctttatgtccttgtctgtggagctctgccctttgatggaccgactcttccaattttgaggcagagggttctggaaggaagattccggattccgtatttcatgtcagaagattgcgagcaccttatccgaaggatgttggtcctagacccatccaaacggctaaccatagcccaaatcaaggagcataaatggatgctcatagaagttcctgtccagagacctgttctctatccacaagagcaagaaaatgagccatccatcggggagtttaatgagcaggttctgcgactgatgcacagccttggaatagatcagcagaaarccattgagtctttgcagaacaagagctataaccactttgctgccatttatttcttgttggtggagcgcctgaaatcacatcggagcagtttcccagtggagcagagacttgatggccgccagcgtcggcctagcaccattgctgagcaaacagttgccaaggcacagactgtggggctcccagtgaccatgcattcaccgaacatgaggctgctgcgatctgccctcctcccccaggcatccaacgtggaggccttttcatttccagcatctggctgtcaggcggaagctgcattcatggaagaagagtgtgtggacactccaaaggtcaatggctgtctgcttgaccctgtgcctcctgtcctggtgcggaagggatgccagtcactgcccagcaacatgatggagacctccattgacgaagggctggagacagaaggagaggccgaggaagaccccgctcatgcctttgaggcatttcagtccacacgcagcgggcagagacggcacactctgtcagaagtgaccaatcaactggtcgtgatgcctggggcagggaaaattttctccatgaatgacagcccctcccttgacagtgtggactctgagtatgatatggggtctgttcagagggacctgaactttctggaagacaacccttcccttaaggacatcatgttagccaatcagccttcaccccgcatgacatctcccttcataagcctgagacctaccaacccagccatgcaggctctgagctcccagaaacgagaggtccacaacaggtctccagtgagcttcagagagggccgcagagcatcagatacctccctcacccagggaattgtagcatttagacaacatcttcagaatctggctagaaccaaaggaattctagagttgaacaaagtgcagttgttgtatgaacaaataggaccggaggcagaccctaacctggcgccggcggctcctcagctccaggaccttgctagcagctgccctcaggaagaagtttctcagcagcaggaaagcgtctccactctccctgccagcgtgcatccccagctgtccccacggcagagcctggagacccagtacctgcagcacagactccagaagcccagccttctgtcaaaggcccagaacacctgtcagctttattgcaaagaaccaccgcggagccttgagcagcagctgcaggaacataggctccagcagaagcgactctttcttcagaagcagtctcaactgcaggcctattttaatcagatgcagatagcagagagctcctacccacagccaagtcagcagctgccccttccccgccaggagactccaccgccttctcagcaggccccaccgttcagcctgacccagcccctgagccccgtcctggagccttcctccgagcagatgcaatacagccctttcctcagccagtaccaagagatgcagcttcagcccctgccctccacttccggtccccgggctgctcctcctctgcccacgcagctacagcagcagcagccgccaccgccaccaccccctccaccaccacgacagccaggagctgccccagcccccttacagttctcctatcagacttgtgagctgccaagcgctgcttcccctgcgccagactatcccactccctgtcagtatcctgtggatggagcccagcagagcgacctaacggggccagactgtcccagaagcccaggactgcaagaggccccctccagctacgacccactagccctctctgagctacctggactctttgattgtgaaatgctagacgctgtggatccacaacacaacgggtatgtcctggtgaattagtctcagcacaggaattgaggtgggtcaggtgaaggaagagtgtatgttcctatttttattccagccttttaaatttaaagcttattttcttgccctctccctaacggggagaaatcgagccacccaactggaatcagagggtctggctggggtggatgttgcttcctcctggttctgccccaccacaaagttttctgtggcaagtgctggaacatagttgtaggctgaggcaggagaatggcgtgaacccgggaggcggagcttgcagtgagccaagatcgtgccactgcactccagcctgggcgactgagcaagactccacctcaaaaaaaaaaaaaaaggacaagagcagtatcatctgcctctgtttctaaactggacaaagagattttcttaaagtttctatcatctcccttctgacaggttctacagtgtggtctgaagcacctgtaatgtcagagcccttgtctggcccttggtggcaggtgaacgaaagcagtggagcctctcaccttccagtagcctctcacattcttattttaccatttttgtcctaattaaggtagcctagctgattctagaagacagccatcctacgtgcacccccaccttgtgtccacatcttctccaggcaggtttcaacctatcagcagactcaggcacacactggggcacagatagagaaccaggcggcagcagtgctcgcagacccacccagggagagctgtgatgggttctgcccagatactctgctcgcccacccacaagggagcaatagcttatatttgtacattagttttaccaagcactttctcttctaaccctcacaacaattctatgaaattagctggggagatactgtccttatttttcacagctgaagaaaccaaagctttgggaagtttgtgacttctctgagatcacagctggtgatagaaggagctgggacacgcgcttgggttgactggcttctggttttggttctctggcttctagtgctggaagaagccctctctttcccttctctttcctcagtagcatctgactcttttcataagcaaacagctgtataaacaaagcccccattttggtcaagcacagggtgaatgtgatattgttcccacaaccttattctccactcaacagccgcctggctttggggaagaggccgccttcaggtgacagtgcagctgtccaggtggccgtgcactgaaccaggctgagggagacaaaaaccccgcagacccgcctgcctttcagcgtccagttaactgcagaagtttaggctcacctcaaagatgtctagtttttccaagttacaatacagcagtttcctacagaacacccccttcctcaattgccaaggggccgcatcgcacggcatcaggccaccactgcaggccagcagattccaccccaggaacggtcatgaactcagcctttgtctcaacgaggggcgtaacatttccttacagtcaagccccatcaactagaagtgcttattacttttaggattaaaaaagtaataacagactttgacttaatactctgtcttttcagaggcaaagtgggtgggtagaggggagctttaaaaatagaagtacaaaacaacatcctggaaacatatgaccccagatggaataatgtcacattccccagtgcagataatgggctgctgctggctctgtggtgtctgtctgcagaagatttgctcagtcaaggaaattcaagtggtgagacctttccaccatgggtggtaagagaaacctgccttcaccaaaatctctgaaggggaaagaagtggagagaaaggtttgcttcacttcggggactgcagtttgagaaataaaagggatacagagatatctgcactttgtagaaagggcaagattatttgcttatatctgaagggaggtgggtggttttgctggatgtttggtctgaaagagttacttttgataaagttaatctaattgtagttatattttctgtgtgcttttttttaattactaagaaaaaaattggtgagttcagtagctttggtattatgagtgcaaatcataatagctccaatgtgaaaaaaaaaatcaaaagtataacttgtcacttaatgttagaaaattgcctaaaatgcagtgtaataaataatctctgtaccaaatagtaatttaaatggggtaattttctgcaaggaaaatgtactgtttttatgtttccaaccctcttga

SEQ ID NO: 39 - DNA, 2291 bp, Homo sapiens
  modified_base (934)..(935): a, t, c, g, other or unknown
gctgtggctccccgtcctggtgcgggacctgtgccccgcgcttcagccctccccgcaagcctattgattcccctgccgcccttgctccacctcctgctcgccatggagtcgctggttttcgcgcggcgctccggccccactccctcggccgcagagctagcccggccgctggcggaagggctgatcaagtcgcccaagcccctaatgaagaagcaggcggtgaagcggcaccaccacaagcacaacctgcggcaccgctacgagttcctggagaccctgggcaaaggcacctacgggaaggtgaagaaggcgcgggagagctcggggcgcctggtggccatcaagtcaatccggaaggacaaaatcaaagatgagcaagatctgatgcacatacggagggagattgagatcatgtcatcactcaaccaccctcacatcattgccatccatgaagtgtttgagaacagcagcaagatcgtgatcgtcatggagtatgccagccggggcgacctttatgactacatcagcgagcggcagcagctcagtgagcgcgaagctaggcatttcttccggcagatcgtctctgccgtgcactattgccatcagaacagagttgtccaccgagatctcaagctggagaacatcctcttggatgccaatgggaatatcaagattgctgacttcggcctctccaacctctaccatcaaggcaagttcctgcagacattctgtgggagccccctctatgcctcgccagagattgtcaatgggaagccctacacaggcccagaggtggacagctggtccctgggtgttctcctctacatcctggtgcatggcaccatgccctttgatgggcatgaccataagatcctagtgaaacagatcagcaacggggcctaccgggagccacctaaaccctctgattgcctgnntggcctgatccggtggctgttgatggtgaaccccacccgccgggccaccctggaggatgtggccagtcactggtgggtcaactggggctacgccacccgagtgggagagcaggaggctccgcatgagggtgggcaccctggcagtgactctgcccgcgcctccatggctgactggctccggcgttcctcccgccccctcctggagaatggggccaaggtgtgcagcttcttcaagcagcatgcacctggtgggggaagcaccacccctggcctggagcgccagcattcgctcaagaagtcccgcaaggagaatgacatggcccagtctctccacagtgacacggctgatgacactgcccatcgccctggcaagagcaacctcaagctgccaaagggcattctcaagaagaaggtgtcagcctctgcagaaggggtacaggaggaccctccggagctcagcccaatccctgcgagcccagggcaggctgcccccctgctccccaagaagggcattctcaagaagccccgacagcgcgagtctggctactactcctctcccgagcccagtgaatctggggagctcttggacgcaggcgacgtgtttgtgagtggggatcccaaggagcagaagcctccgcaagcttcagggctgctcctccatcgcaaaggcatcctcaaactcaatggcaagttctcccagacagccttggagctcgcggcccccaccaccttcggctccctggatgaactcgccccacctcgccccctggcccgggccagccgaccctcaggggctgtgagcgaggacagcatcctgtcctctgagtcctttgaccagctggacttgcctgaacggctcccagagcccccactgcggggctgtgtgtctgtggacaacctcacggggcttgaggagcccccctcagagggccctggaagctgcctgaggcgctggcggcaggatcctttgggggacagctgcttttccctgacagactgccaggaggtgacagcgacctaccgacaggcactgagggtctgctcaaagctcacctgagtggagtaggcattgccccagcccggtcaggctctcagatgcagctggttgcaccccgaggggagatgccttctcccccacctcccaggacctgcatcccagctcagaaggctgagagggtttgcagtggagccctgagcagggctggatatgggaagtaggcaaatgaaatgcgccaagggttcagtgtctgtcttcagccctgctgaacgaagaggatactaaagagaggggaacgggaatgcccgcgacagagtccacattgcctgtttcttgtgtacatggaggggccacagaga

SEQ ID NO: 40 - DNA, 2145 bp, Homo sapiens
atgccggcggcggcgggggacgggctcctgggggagccggcggcgcctgggggcggcggcggcgcggaggacgcggccaggcccgcggcggcctgcgagggaagtttcctgcctgcctgggtgagcggcgtgccccgcgagcggctccgcgacttccagcaccacaagcgcgtgggcaactacctcatcggcagcaggaagctgggcgagggctcctttgccaaggtgcgcgaggggctgcacgtgctgaccggggagaaggtggccataaaagtcattgataagaagagagccaaaaaggacacctatgtcaccaaaaacctgcggcgagagggtcagatccagcagatgatccgccaccccaatatcactcagctccttgatattttagaaacggaaaacagctactacctggtcatggagctgtgccctgggggcaacctgatgcacaagatctatgagaagaagcggctggaggagtccgaagcccgcagatacatccgacagctcatctctgccgtagagcacctgcaccgggccggggtggtccacagagacttgaagatagagaatttgctactagatgaagacaataatatcaagctgattgactttggtttgagcaactgcgcagggatcctgggttactcggatccgttcagcacacagtgtggcagccctgcctacgctgcacctgaactgctcgccaggaagaaatacggccccaaaatcgatgtctggtccataggtgtgaacatgtatgccatgttgaccgggacgctgcctttcacggtggagcctttcagcctgagggctttgtaccagaagatggtagacaaagaaatgaaccccctccccactcagctctccacaggtgccatcagtttcctgcgctctctcctggaaccggatcctgtgaagaggccaaatattcagcaggcactggcgaatcgctggcttaatgagaattacacgggcaaagtgccctgtaatgtcacctatcccaacaggatttctctggaagatctgagcccgagcgtcgtgctgcacatgaccgagaagctgggttacaagaacagcgacgtgatcaacactgtgctctccaaccgcgcctgccacatcctggccatctacttcctcttaaacaagaaactggagcgctatttgtcagggaaatctgacatccaggacagcctctgctacaagacccggctctaccagatagaaaagtacagggcccccaaggagtcctatgaggcctctctggacacctggacacgagatcttgaattccatgccgtgcaggataaaaagcccaaagaacaagaaaaaagaggggattttcttcatcgaccattctccaagaagttggacaagaacctgccctcgcacaaacagccctcaggctcgcttatgacacagattcagaacaccaaagccctcctgaaggaccggaaggcctccaagtccagcttccccgacaaagattcctttggctgccgcaatattttccgcaaaacctcagattccaattgtgtggcttcttcttccatggagttcatccccgtgccaccgcccaggaccccgaggattgtgaagaaaccggagccccatcagccagggcccggaagcactggcatcccccacaaggaagaccccctgatgctggacatggtgcgctccttcgagtctgtggatcgcgacgaccacgtagaagtgctgtctccctctcatcactacaggattctgaactccccggtcagcttggctcgcagaaattccagcgagaggacgctgtccccgggtctgccatccggaagcatgtcgcctctccatactcctttgcatccaactctggtctcttttgctcacgaagataagaacagccccccaaaagaggagggcctgtgttgcccacctccggttcccagcaatggccccatgcagcctctggggagccccaattgtgtgaaaagccgaggccggttccctatgatgggcatcggacagatgttaaggaagcgccatcagagtctgcagccatctgcagataggcccctggaggccagcctgcccccactgcagcccctagcccctgtgaaccttgcctttgacatggccgatggggtcaagacccagtgctaa

SEQ ID NO: 41 - DNA, 2625 bp, Homo sapiens
atggacacaaagctgaacatgctgaacgagaaggtggaccagctcctgcacttccaagaagatgtcacagagaagttgcagagcatgtgccgagacatgggccacctggagcggggcctgcacaggctggaggcctcccgggcaccgggcccgggcggggctgatggggttccccacattgacacccaggctgggtggcccgaggtcctggagctggtgagggccatgcagcaggatgcggcccagcacggtgccaggctggaggccctcttcaggatggtggctgcggtggacagggccatcgctttggtgggggccacgttccagaaatcaaaggtggcggatttcctcatgcaggggcgtgtgccctggaggagaggcagcccaggtgacagccctgaggagtgggtaaaagaggaggaggtctgtttcatgcctccagttcccccagctccgggggcagcaggacagagcctgcagaaggataagggggagctgtctgccgagcaggggatctgggccacattgatgacgctggtgatcatggtgacagcggcaaataaagagcgagtggaagaagagggaggaaaaccaaagcatgtgctgagcaccagtggggtgcagtctgatgccagggagcctggggaagagagccagaaggcggacgtgctggaggggacagcggagaggctgccccccatcagagcgtcagggctgggagctgaccccgcccaggcagtggtctcaccgggccagggagatggtgttcctggcccagcccaggcattccctggccacctgcccctgcccacaaaggtggaagccaaggctcctgagacacccagcgagaacctcaggactggcctggaattggctccagcacccggcagggtcaatgtggtctccccgagcctggaggttgcaccaggtgcaggacaaggagcatcgtccagcaggcctgaccctgagcccttagaggaaggcacgaggctgactccagggcctggccctcagtgcccagggcctccagggctgccagcccaggccagggcaacccacagtggtggagaaacacctccaagggcagccctgctgaagggcgctgtggccccgggcttctctcggagggacctggtgtttcctagcatcttctgcgcctgcctagggatctccatccacatacaagagatggatactcctggggagatgctgatgacaggcaggggcagccttggacccaccctcaccacagaggctccagcagctgcccagccaggcaagcagggcccacctgggaccgggcgctgcctccaagcccctgggactgagcccggagaacagacccctgaaggagccagagagctctccccgctgcaggagagcagcagccccgggggagtgaaggcagaggaggagcaaagggctggggccgagcctggcacgagaccaagcttggccaggagtgacgacaatgaccacgaggttggggccctgggcctgcagcagggcaaaagcccaggggcgggaaaccctgagcctgagcaggactgtgcagccagggctccggtgagagctgaagcagtaaggaggatgcccccaggcgccgaggctggcagcgtggttctggatgacagtccggccccaccagctccttttgaacaccgggtagtgagcgtcaaggagacctccatctctgcgggttacgaggtgtgccagcacgaagtcttgggagggggtcggtttggccaggtccacaggtgcacagagaagtccacaggcctcccactggctgccaagatcatcaaagtgaagagcgccaaggaccgggaggacgtgaagaacgagatcaacatcatgaaccagctcagccacgtgaacctgatccagctctatgacgccttcgagagcaagcacagctgcacccttgtcatggagtacgtggacgggggtgagctcttcgaccggatcacagatgagaagtaccacctgactgagctggatgtggtcctgttcaccaggcagatctgtgagggtgtgcattacctgcaccagcactacatcctgcacctggacctcaagccggagaacatattgtgcgtcaatcagacaggacatcaaattaagatcattgactttgggctggccagaaggtacaagcctcgagagaagctgaaggtgaacttcggcactcctgagttcctggccccagaagtcgtcaattatgagtttgtctcattccccacagacatgtggagtgtgggagtcatcacctacatgctactcagtggcttgtccccatttctaggggaaacagatgcagagaccatgaatttcattgtaaactgtagctgggattttgatgctgacacctttgaagggctctcggaggaggccaaggactttgtttcccggttgctggtcaaagagaagagctgcagaatgagtgccacacagtgcctgaaacacgagtggctgaataatttgcctgccaaagcttcaagatccaaaactcgtctcaaatcccaactactgctgcagaaatacatagctcaaagaaaatggaagaaacatttctatgtggtgactgctgccaacaggttaaggaaatttccaacttctccctaa

SEQ ID NO: 42 - DNA, 7710 bp, Homo sapiens
ggggagatggcgctgtttgagtgcctggtggcggggcccactgacgtggaggtggattggctgtgccgtggccgcctgctgcagcctgcactgctcaaatgcaagatgcatttcgatggccgcaaatgcaagctgctacttacatctgtacatgaggacgacagtggcgtctacacctgcaagctcagcacggccaaagatgagctgacctgcagtgcccggctgaccgtgcggccctcgttggcacccctgttcacacggctgctggaagatgtggaggtgttggagggccgagctgcccgtttcgactgcaagatcagtggcaccccgccccctgttgttacctggactcattttggctgccccatggaggagagtgagaacttgcggctgcggcaggacgggggtctgcactcactgcacattgcccatgtgggcagcgaggacgaggggctctatgcggtcagtgctgttaacacccatggccaggcccactgctcagcccagctgtatgtagaagagccccggacagccgcctcaggccccagctcgaagctggagaagatgccatccattcccgaggagccagagcagggtgagctggagcggctgtccattcccgacttcctgcggccactgcaggacctggaggtgggactggccaaggaggccatgctagagtgccaggtgaccggcctgccctaccccaccatcagctggttccacaatggccaccgcatccagagcagcgacgaccggcgcatgacacagtacagggatgtccatcgcttggtgttccctgccgtggggcctcagcacgccggtgtctacaagagcgtcattgccaacaagctgggcaaagctgcctgctatgcccacctgtatgtcacagatgtggtcccaggccctccagatggcgccccgcaggtggtggctgtgacggggaggatggtcacactcacatggaacccccccaggagtctggacatggccatcgacccggactccctgacgtacacagtgcagcaccaggtgctgggctcggaccagtggacggcactggtcacaggcctgcgggagccagggtgggcagccacagggctgcgtaagggggtccagcacatcttccgggtcctcagcaccactgtcaagagcagcagcaagccctcacccccttctgagcctgtgcagctgctggagcacggcccaaccctggaggaggcccctgccatgctggacaaaccagacatcgtgtatgtggtggagggacagcctgccagcgtcaccgtcacattcaaccatgtggaggcccaggtcgtctggaggagctgccgaggggccctcctagaggcacgggccggtgtgtacgagctgagccagccagatgatgaccagtactgtcttcggatctgccgggtgagccgccgggacatgggggccctcacctgcaccgcccgaaaccgtcacggcacacagacctgctcggtcacattggagctggcagaggcccctcggtttgagtccatcatggaggacgtggaggtgggggctggggaaactgctcgctttgcggtggtggtcgagggaaaaccactgccggacatcatgtggtacaaggacgaggtgctgctgaccgagagcagccatgtgagcttcgtgtacgaggagaatgagtgctccctggtggtgctcagcacgggggcccaggatggaggcgtctacacctgcaccgcccagaacctggcgggtgaggtctcctgcaaagcagagttggctgtgcattcagctcagacagctatggaggtcgagggggtcggggaggatgaggaccatcgaggaaggagactcagcgacttttatgacatccaccaggagatcggcaggggtgctttctcctacttgcggcgcatagtggagcgtagctccggcctggagtttgcggccaagttcatccccagccaggccaagccaaaggcatcagcgcgtcgggaggcccggctgctggccaggctccagcacgactgtgtcctctacttccatgaggccttcgagaggcgccggggactggtcattgtcaccgagctctgcacagaggagctgctggagcgaatcgccaggaaacccaccgtgtgtgagtctgagatccgggcctatatgcggcaggtgctagagggaatacactacctgcaccagagccacgtgctgcacctcgatgtcaagcctgagaacctgctggtgtgggatggtgctgcgggcgagcagcaggtgcggatctgtgactttgggaatgcccaggagctgactccaggagagccccagtactgccagtatggcacacctgagtttgtagcacccgagattgtcaatcagagccccgtgtctggagtcactgacatctggcctgtgggtgttgttgccttcctctgtctgacaggaatctccccgtttgttggggaaaatgaccggacaacattgatgaacatccgaaactacaacgtggccttcgaggagaccacattcctgagcctgagcagggaggcccggggcttcctcatcaaagtgttggtgcaggaccggctgagacctaccgcagaagagaccctagaacatccttggttcaaaactcaggcaaagggcgcagaggtgagcacggatcacctgaagctattcctctcccggcggaggtggcagcgctcccagatcagctacaaatgccacctggtgctgcgccccatccccgagctgctgcgggcccccccagagcgggtgtgggtgaccatgcccagaaggccaccccccagtggggggctctcatcctcctcggattctgaagaggaagagctggaagagctgccctcagtgccccgcccactgcagcccgagttctctggctcccgggtgtccctcacagacattcccactgaggatgaggccctggggaccccagagactggggctgccacccccatggactggcaggagcagggaagggctccctctcaggaccaggaggctcccagcccagaggccctcccctccccaggccaggagcccgcagctggggctagccccaggcggggagagctccgcaggggcagctcggctgagagcgccctgccccgggccgggccgcgggagctgggccggggcctgcacaaggcggcgtctgtggagctgccgcagcgccggagccccggcccgggagccacccgcctggcccggggaggcctgggtgagggcgagtatgcccagaggctgcaggccctgcgccagcggctgctgcggggaggccccgaggatggcaaggtcagcggcctcaggggtcccctgctggagagcctggggggccgtgctcgggacccccggatggcacgagctgcctccagcgaggcagcgccccaccaccagcccccactcgagaaccggggcctgcaaaagagcagcagcttctcccagggtgaggcggagccccggggccggcaccgccgagcgggggcgcccctcgagatccccgtggccaggcttggggcccgtaggctacaggagtctccttccctgtctgccctcagcgaggcccagccatccagccctgcacggcccagcgcccccaaacccagtacccctaagtctgcagaaccttctgccaccacacctagtgatgctccgcagccccccgcaccccagcctgcccaagacaaggctccagagcccaggccagaaccagtccgagcctccaagcctgcaccacccccccaggccctgcaaaccctagcgctgcccctcacaccctatgctcagatcattcagtccctccagctgtcaggccacgcccagggcccctcgcagggccctgccgcgccgccttcagagcccaagccccacgctgctgtctttgccagggtggcctccccacctccgggagcccccgagaagcgcgtgccctcagccgggggtcccccggtgctagccgagaaagcccgagttcccacggtgccccccaggccaggcagcagtctcagtagcagcatcgaaaacttggagtcggaggccgtgttcgaggccaagttcaagcgcagccgcgagtcgcccctgtcgctggggctgcggctgctgagccgttcgcgctcggaggagcgcggccccttccgtggggccgaggaggaggatggcatataccggcccagcccggcggggaccccgctggagctggtgcgacggcctgagcgctcacgctcggtgcaggacctcagggctgtcggagagcctggcctcgtccgccgcctctcgctgtcactgtcccagcggctgcggcggacccctcccgcgcagcgccacccggcctgggaggcccgcggcggggacggagagagctcggagggcgggagctcggcgcggggctccccggtgctggcgatgcgcaggcggctgagcttcaccctggagcggctgtccagccgattgcagcgcagtggcagcagcgaggactcggggggcgcgtcgggccgcagcacgccgctgttcggacggcttcgcagggccacgtccgagggcgagagtctgcggcgccttggccttccgcacaaccagttggccgcccaggccggcgccaccacgccttccgccgagtccctgggctccgaggccagcgccacgtcgggctcctcagccccaggggaaagccgaagccggctccgctggggcttctctcggccgcggaaggacaaggggttatcgccaccaaacctctctgccagcgtccaggaggagttgggtcaccagtacgtgcgcagtgagtcagacttccccccagtcttccacatcaaactcaaggaccaggtgctgctggagggggaggcagccaccctgctctgcctgccagcggcctgccctgcaccgcacatctcctggatgaaagacaagaagtccttgaggtcagagccctcagtgatcatcgtgtcctgcaaagatgggcggcagctgctcagcatcccccgggcgggcaagcggcacgccggtctctatgagtgctcggccaccaacgtactgggcagcatcaccagctcctgtaccgtggctgtggcccgagtcccaggaaagctagctcctccagaggtaacccagacctaccaggacacggcgctggtgctgtggaagccgggagacagccgggcaccttgcacgtatacgctggagcggcgagtggatggggagtctgtgtggcaccctgtgagctcaggcatccccgactgttactacaacgtgacccacctgccagttggcgtgactgtgaggttccgtgtggcctgtgccaaccgtgctgggcaggggcccttcagcaactcttctgagaaggtctttgtcaggggtactcaagattcttcagctgtgccatctgctgcccaccaagaggcccctgtcacctcaaggccagccagggcccggcctcctgactctcctacctcactggccccacccctagctcctgctgcccccacacccccgtcagtcactgtcagcccctcatctccccccacacctcctagccaggccttgtcctcgctcaaggctgtgggtccaccaccccaaacccctccacgaagacacaggggcctgcaggctgcccggccagcggagcccaccctacccagtacccacgtcaccccaagtgagcccaagcctttcgtccttgacactgggaccccgatcccagcctccactcctcaaggggttaaaccagtgtcttcctctactcctgtgtatgtggtgacttcctttgtgtctgcaccaccagcccctgagcccccagcccctgagccccctcctgagcctaccaaggtgactgtgcagagcctcagcccggccaaggaggtggtcagctcccctgggagcagtccccgaagctctcccaggcctgagggtaccactcttcgacagggtccccctcagaaaccctacaccttcctggaggagaaagccaggggccgctttggtgttgtgcgagcgtgccgggagaatgccacggggcgaacgttcgtggccaagatcgtgccctatgctgccgagggcaagccgcgggtcctgcaggagtacgaggtgctgcggaccctgcaccacgagcggatcatgtccctgcacgaggcctacatcacccctcggtacctcgtgctcattgctgagagctgtggcaaccgggaactcctctgtgggctcagtgacaggttccggtattctgaggatgacgtggccacttacatggtgcagctgctacaaggcctggactacctccacggccaccacgtgctccacctagacatcaagccagacaacctgctgctggcccctgacaatgccctcaagattgtggactttggcagtgcccagccctacaacccccaggcccttaggccccttggccaccgcacgggcacgctggagttcatggctccggagatggtgaagggagaacccatcggctctgccacggacatctggggagcgggtgtgctcacttacattatgctcagtggacgctccccgttctatgagccagacccccaggaaacggaggctcggattgtggggggccgctttgatgccttccagctgtaccccaatacatcccagagcgccaccctcttcttgcgaaaggttctctctgtacatccctggagccggccctccctgcaggactgcctggcccacccatggttgcaggacgcctacctgatgaagctgcgccgccagacgctcaccttcaccaccaaccggctcaaggagttcctgggcgagcagcggcggcgccgggctgaggctgccacccgccacaaggtgctgctgcgctcctaccctggcggcccctagaggcacggaccacagccaggcctcgggcttcaactggggttcccaccaatgccacgggacattccagggcccacgctgagccaggcgggcctggggcttcggttaccaccagcagcaacatctggctgggctcttacctcatagaccttcaaggacagagaccccagggcctggacctgatgccaccccaggccaaagccagagtgggagacccattggtcaggctcagcagggtgggaacaggcagagggacaagaggggaatggagaagtggagaggaaaaggaatcgagggacaggaagggggaggctctaggaaggttctgggttgggggtcagtgcatctcagggagaaccaaggaaggtgggcatggctggagaggaggaaaaggaaggagccccaggtgtcagggcagtaggctgggagtcagtgtggcaaagcgggggcaggacacagatacagtggcaggggcccagggctgggacatgagagaaggcagcgaggcggcagagggagaagagaggactcaggtggaggtggggtgggtcagctgtcagcatccctcagaggagaaatgtggagagctggaggccagcagtcactcacactcgctctgtcctcctgtccagtggatacagccctgggcgctctgctggcccaaggatgtccccactgcccctccatggcctttggccttcttcccattcatatttatttatttattgacttttatgaagtttccccttccatccgatccctactgcccatgttgtcctgaccatccctcccagccatccagctgtctgtctgtctgccacaaggaaataaaaatggcaagcagcaaaaaaa

SEQ ID NO: 43 - DNA, 1251 bp, Murine sp.
gccacggacatctggggagcgggtgtgctcacctacatcatgcttagtgggtactccccattctatgagccagacccccaggaaacagaggctcggattgttgggggtcgctttgatgccttccagttgtatcctaacacatcccagagtgccaccctcttcttgagaaaggtcctctcagtacatccctggagccggccctctctgcaggactgcttggcccacccatggctgcaagatgcctacctgatgaagctgcgccgccagacactcaccttcaccaccaaccggctcaaggaattcctgggcgagcagcggcgacgtcgggctgaggctgctacccgtcacaaggtgctgctccgctcctaccctggcagcccctaggtggcacagaccgcagcccggccacgggcttcaacttgggttctcactcgcgctgccaagggacattccagagcccatgctgagctggacaggcaggggcttcagataccagcagcagcagcagcagcagcagcagcaacatctggctgggctattacctcatggacctaagaggacaaggccctggggcttcagccgaatgtcaccccggccataaccagagcaggagacccactggccaggctgggcaagggtgagagcagaaagaggcaaagagggagttgggaagtgaagaatgagacggaggatagagagggaggagtttgaggaaggttctaggctggagtggaatgctatatctcagggagaagccagaaggggacatggctgaagaggaagaaggaccctgtgatgtgggaatgtggtggagaggaggactggacatagagagtgtgccaggagccagagcagagacataagggagggcagaagggtagaaggcaacaggagtgggctcaggggtggcagggcaggccagcagctgcatcttcagaaagagagaggagaaaggcaaagagacgaaaggccgctccagctggtctcctgtcccagccgatgcagttctgggcgttctccactggcccagggatgtcctcactgctcctccatggcctttgccctccttcccatttgtatttatttatttattgccttttgtggagtttcctttctatccagtccctagtgcctatgttgtcccgaccatcccccttcagtcacccagctgtctgtgcagctgtctgtctgtctgtcacaaggaaaataaaacaaaacaaaacaaaacaaaacaaacaaaaaaaaaacagc

SEQ ID NO: 44 - DNA, 3864 bp, Homo sapiens
atgaagggcggcgacagggcttacacccgaggtccctctttggggtggctctttgctaagtgctgctgttgcttcccgtgtagagatgcatactctcattcctcaagcgagaatggaggcaagtccgagtccgtagccaacctgcaggcccagccctccctgaacttcatccacagttccccgggtcccaagcgctccaccaacactcttaagaagtggctgacgagtcctgtgcgtcggctcaacagcgggaaggcagatggaaacatcaaaaagcagaagaaagttcgcgatggtcggaagagctttgacctgggatctcccaagcctggggatgaaacaacccctcagggagacagcgctgatgagagcaagaaaggttggggtgaagatgagccggatgaagagtcacacacacccctcccaccacctatgaagatttttgacaacgaccctacacaggatgaaatgtcctcctctttgctagcagcccggcaggcttccactgaagtacctactgctgcagaccttgtcaatgcaatagaaaagttggtcaaaaacaagctgagtctagaaggaagctcataccgggggagcttgaaagaccctgcaggctgcctgaatgaggggatggccccacccacacctcctaaaaatccagaagaagaacagaaagccaaggccctgagaggcaggatgtttgtcctgaatgagctggtacagacagagaaagactatgtcaaggatctgggcattgtggtggagggcttcatgaagagaatagaagaaaagggtgtccctgaggatatgcgaggaaaggacaaaatcgtgtttggaaatattcatcagatttatgactggcataaggattttttcctggcggaactggaaaagtgtatccaggagcaagacagattggcacagctctttattaagcacgagcggaagctgcacatctacgtgtggtattgtcagaataagccgcgctcagagtacatcgttgctgagtatgacgcctactttgaggaggtaaaacaggagataaatcagaggctgacactgagtgacttcctcatcaagcccattcagagaataacaaaataccagttgctcctcaaggacttcctgagatacagtgagaaggctggtttggagtgttcagatatcgagaaagcagtggagttaatgtgccttgttcccaaacgctgcaatgacatgatgaatctaggacgtctgcagggctttgagggcactctgactgctcaggggaagctactgcagcaggacacattctatgtgatcgagctggatgcaggcatgcagtcccggaccaaagagaggcgcgtgttcctcttcgagcagattgtcatcttcagtgaactgctcaggaagggatccctcacccctggctacatgttcaaaaggagcatcaagatgaattacttggtcctggaggagaatgtggacaatgatccctgcaagtttgcactcatgaacagagagacttctgagagggttgttctgcaagccgccaacgctgacatccagcaggcctgggtgcaggacatcaatcaagtcttagaaacacagcgagactttttgaatgcactgcaatcgcccattgagtatcaacggaaagaaaggagcacagctgtgatgaggtctcaacctgccaggcttccccaagccagccccaggccctactcctctgttcctgcgggctcagagaagcccccaaagggctccagctataacccacctctgcctcccctgaagatatctacctccaatggcagtccagggtttgaataccaccagcctggggacaagttcgaagccagcaagaacgacctgggaggctgcaatgggacctcgtccatggccgtgatcaaagattactatgcactgaaggagaatgaaatctgtgtgagccaaggtgaggtggtccaggtcctcgccgtcaaccagcagaacatgtgtctggtgtaccagcctgccagcgaccattcccccgccgccgagggctgggtcccaggcagcatcctggcgcccctcaccaaagccacagcagcagaaagtagtgacgggagcatcaagaagtcatgttcatggcatactctacgcatgagaaagcgggcggaagtggagaacacgggtaaaaatgaagccacagggcctcgtaaacccaaggatattctgggcaacaaagtctctgttaaagagacgaacagttccgaggaatcagagtgtgatgatcttgaccctaatactagcatggagatcttaaatccaaatttcatccaagaagtggccccagaattccttgtgcccttggtggatgtgacctgcttgcttggggacacagtgatactgcagtgcaaagtctgtgggcggccaaagcccaccatcacttggaagggtccagaccagaacatccttgacactgataacagctcagccacatacacggtctcctcttgtgattctggagaaatcaccctgaagatctgtaatctgatgccccaagacagtgggatttatacctgcatagcaacaaatgaccacgggaccacatcaacgtctgcaacagtcaaagtgcaaggtgttccagcagcccctaaccgccccattgcccaggagagaagctgcacctccgtgattctccgctggctgcccccctccagcacaggaaactgcactatttctggttacactgtggagtacagagaggaaggttctcagatctggcagcagtcagtggcttcgaccttggacacttacctcgtcatcgaagaccttagtcccgggtgtccttatcagttcagagtcagtgccagtaacccctggggaatcagccttcccagcgagccctcggagtttgtgcgacttccagaatacgatgctgctgctgatggtgccaccatttcttggaaggaaaattttgactcagcttacactgagctgaatgaaattggaagaggccgtttctctatagtaaagaaatgcattcacaaagctacccgcaaagatgtggctgtgaaatttgttaacaaaaaaatgaagaagaaagaacaggctgcccacgaggctgccctgcttcagcacctacagcacccccagtacatcactctccatgacacctatgagtcccccacatcctacatcctgatcttggaactgatggatgatggccggctcttagactaccttatgaatcatgatgaactgatggaggaaaaagtagctttctatatccgagacatcatggaggctctgcagtaccttcacaactgcagggttgcacatttggacataaagcctgaaaacctgctcattgacctacggattccagtgcctcgagtgaagctcattgacttggaggatgctgtccagatctcgggtcacttccacattcaccacctgctggggaaccctgagtttgctgccccagaagtcattcaaggcatccccgtctccctggggacagacatctggagcatcggggttctgacatatgtcatgctgagtggggtctcccccttcttggatgagagcaaagaggagacatgtatcaacgtatgcagggtggatttcagcttcccccatgaatacttctgtggtgtgagcaatgctgccagagatttcatcaatgtgatcttacaggaagattttcggaggcggcccacagcagccacatgcttgcagcatccatggctgcagccccataatggcagctactctaagatccccctggacacctcccgcctagcatgcttcatagaacgtcgcaagcaccagaatgatgtgcggcctatccccaatgtcaagagctacattgtcaaccgggtgaaccaagggacgtag

SEQ ID NO: 45 - DNA, 2586 bp, Homo sapiens
cgccgctgtttgtcctcgcgcggccccgtccactgccctgcggttgctctgcgggctgaaaagtttctcccggtgcagaattccgggctcagcgacagcctgcgccgagtgtgcgcacctgtcggagacccgccagtccgccggccccggctttgttcgtgcggaactgtagtggtgagaaaaactccatgtctgggcacgcctggctgatcttcacctctttcttctaggaccttcctctgggctgtcacgtgtgaatatgtgtctagtgcatccttaacctgaggacttcaccagttcgaaattacagttttcaccatcaactaccttatcctttttggcctggttttcttcctcaaacagtggaaacatttttaaagttgcttttgttgcagagttaaacaaatggctgatagtggcttagataaaaaatccacaaaatgccccgactgttcatctgcttctcagaaagatgtactttgtgtatgttccagcaaaacaagggttcctccagttttggtggtggaaatgtcacagacatcaagcattggtagtgcagaatctttaatttcactggagagaaaaaaagaaaaaaatatcaacagagatataacctccaggaaagatttgccctcaagaacctcaaatgtagagagaaaagcatctcagcaacaatggggtcggggcaactttacagaaggaaaagttcctcacataaggattgagaatggagctgctattgaggaaatctatacctttggaagaatattgggaaaagggagctttggaatagtcattgaagcgacagacaaggaaacagaaacgaagtgggcaattaaaaaagtgaacaaagaaaaggctggaagctctgctgtgaagttacttgaacgagaggtgaacattctgaaaagtgtaaaacatgaacacatcatacatctggaacaagtatttgaaacgccaaagaaaatgtaccttgtgatggagctttgtgaggatggagaactcaaagaaattctggataggaaagggcatttctcagagaatgagacaaggtggatcattcaaagtctcgcatcagctatagcatatcttcacaataatgatattgtacatagagatctgaaactggaaaatataatggttaaaagcagtcttattgatgataacaatgaaataaacttaaacataaaggtgactgattttggcttagcggtgaagaagcaaagtaggagtgaagccatgctgcaggccacatgtgggactcctatctatatggcccctgaagttatcagtgcccacgactatagccagcagtgtgacatttggagcataggagtcgtaatgtacatgttattacgtggagaaccaccctttttggcaagctcagaagcgaagctttttgagttaataagaaaaggagaactacattttgaaaatgcagtctggaattccataagtgactgtgctaaaagtgttttgaaacaacttatgaaagtagatcctgctcacagaatcacagctaaggaactactagataaccagtggttaacaggcaataaactttcttcggtgagaccaaccaatgtattagagatgatgaaggaatggaaaaataacccagaaagtgttgaggaaaacacaacagaagagaagaataagccgtccactgaagaaaagttgaaaagttaccaaccctggggaaatgtccctgagaccaattacacttcagatgaagaggaggaaaaacagtctactgcttatgaaaagcaatttcctgcaaccagtaaggacaactttgatatgtgcagttcaagtttcacatctagcaaactccttccagctgaaatcaagggagaaatggagaaaacccctgtgactccaagccaaggaacagcaaccaagtaccctgctaaatccggcgccctgtccagaaccaaaaagaaactctaaggttccctccagtgttggacagtacaaaaacaaagctgctcttgttagcactttgatgagggggtaggaggggaagaagacagccctatgctgagcttgtagccttttagctccacagagccccgccatgtgtttgcaccagcttaaaattgaagctgcttatctccaaagcagcataagctgcacatggcattaaaggacagccaccagtaggcttggcagtgggctgcagtggaaatcaactcaagatgtacacgaaggttttttaggggggcagataccttcaatttaaggctgtgggcacacttgctcatttttacttcaaattcttatgtttaggcacagctatttataggggaaaacaagaggccaaatatagtaatggaggtgccaaataattatgtgcactttgcactagaagactttgttagaaaattactaataaacttgccatacgtattacagcagaagtgcttcagtcattcacatgtgttcgtgagattttaggttgctatagattgtttaagacagcttattttaaatgtagaaaaataggagattttgtaactgcttgccattaacttgctgctaaattcccaatgtattgattaaatcaataaaaaacagatgttactc

SEQ ID NO: 46 - DNA, 1620 bp, Homo sapiens
gggtccgcagcccgccctcacaggccctcctcactcccctaggtagatggccccctcagggcaggcccggcggacacccctccctctggctggcggatgcagtgcctagcggccgcccttaaggacgaaaccaacatgagtgggggaggggagcaggccgacatcctgccggccaactacgtggtcaaggatcgctggaaggtgctgaaaaagatcgggggcgggggctttggtgagatctacgaggccatggacctgctgaccagggagaatgtggccctcaaggtggagtcagcccagcagcccaagcaggtcctcaagatggaggtggccgtgctcaagaagttgcaaggttcgggcctcgggcagggggatgggaaggaagagatgatgaagccaggggctaagagagggaaggaccatgtgtgcaggttcattggctgtggcaggaacgagaagtttaactatgtagtgatgcagctccagggccggaacctggccgacctgcgccgtagccagccgcgaggcaccttcacgctgagcaccacattgcggctgggcaagcagatcttggagtccatcgaggccatccactctgtgggcttcctgcaccgtgacatcaagccttcaaactttgccatgggcaggctgccctccacctacaggaagtgctatatgctggacttcgggctggcccggcagtacaccaacaccacgggggatgtgcggccccctcggaatgtggccgggtttcgaggaacggttcgctatgcctcagtcaatgcccacaagaaccgggagatgggccgccacgacgacctgtggtccctcttctacatgctggtggagtttgcagtgggccagctgccctggaggaagatcaaggacaaggaacaggtagggatgatcaaggagaagtatgagcaccggatgctgctgaagcacatgccgtcagagttccacctcttcctggaccacattgccagcctcgactacttcaccaagcccgactaccagttgatcatgtcagtgtttgagaacagcatgaaggagaggggcattgccgagaatgaggcctttgactgggagaaggcaggcaccgatgccctcctgtccacgagcacctctaccccgcccccagcagaacacccggcagacggcagccatgtttggggtggtcaatgtgacgccagtgcctggggacctgctccgggagaacaccgcggatgtgctacagggagagcacctgagtgaccaggagaatgcacccccaattctgcccgggaggccctctgaggggctgggccacagtccccaccttgtcccccaccccgggggtcctgaggctgaagtctgggaggagacagatgtcaaccggaacaaactccggatcaacatcggcaaagtaactgccgccagggcgaagggcgtgggtggccttttctctcacccccgattcccagccttgtgcccctgccctgttcctcctaagcaccctgtcccccgccaatctccctgcttgcccggcctctgtttccggtcccctccccggcactagcctcgctgtgtcttccatcatcatcatcctctgtctccttcacactgaggagaccatccgcc

SEQ ID NO: 47 - DNA, 2452 bp, Homo sapiens
  modified_base (819): a, t, c, g, other or unknown
ggcgcgccagatatcacacgtgccaaggggctggctcagcggcggcggcggcaggagggggagcaggtgctggcacaagagcagcggcttgggggagccggcagcagcagtaacagcagcagcagccgccgccgccgccgccagtaaacgcggaccgtaccccaggggactacccagccggccggccctggaagccgcgctcgggtcccgccgcagtcggcggtgggggatgggcaggcagtggcggtcccgcctgccgagggttaacccccgccggtcccggtcctgagctggaccagagccctcctccagaaacccctgcgtccgccacggcccaggttaaatggaaaccacccttgggaactggatgcctgtgtagctgttctaccatatcagtgtattgcaatgagtgggggaggagagcagctggatatcctgagtgttggaatcctagtgaaagaaagatggaaagtgttgagaaagattgggggtgggggctttggagaaatttacgatgccttggacatgctcaccagggaaaatgttgcactgaaggtggaatcagctcaacaaccaaaacaagttctgaaaatggaagttgctgttttgaaaaagctgcaagggaaagaccatgtttgtagatttattggctgtgggaggaatgatcgattcaactatgtggtcatgcagttgcagggtcggaatctggcagatcttcgccgtagccagtcccgaggcacattcaccattagtaccactctccggctgggtagacagattttggagtctattgaaagcattcattctgtgggatcttgncatcgagacatcaaaccgtcgaacttcgctatgggtcgctttcctagtacatgtaggaaatgttacatgcttgattttggcttggctcgacaatttaccaattcctgtggtgacgtcagaccacctcgagctgtggcaggttttcgagggacagttcgttatgcatcaatcaacgcacatcggaacagggaaatgggaagacatgatgacctttggtccttattctacatgttggtggagtttgtggttggtcagctgccctggagaaaaataaaggacaaggagcaagtaggctctattaaggagagatatgaccacaggctcatgttgaaacatctccctccagaattcagcatctttctagaccatatctcttctttggattattttacaaaaccagactaccagcttcttacatccgtgtttgacaatagcatcaagacttttggagtaattgagagtgacccttttgactgggagaagactggaaatgatggctccctaacaaccaccactacttctaccacccctcagttgcacactcgcttgacccctgctgcaattggaattgccaatgctactcccatccctggagacttgcttcgagaaaatacagatgaggtatttccagatgaacagcttagcgatggagaaaatggcatccctgttggtgtgtcaccagataaattgcctggatctctgggacacccccgtccccaggagaaggatgtttgggaagagatggatgccaacaaaaacaagataaagcttggaatttgtaaggctgctactgaagaggagaacagccatggccaggcaaatggtcttctcaatgctccaagccttgggtcaccaattcgtgtccgctcagagattactcagccagacagagatattccactggtgcgaaagttacgttccattcacagctttgagctggaaaaacgtctgaccctggagccaaagccagacactgacaagttccttgagacctggtataaaatagtgtatttttctttttaaagcttctaaggtaccattattattgttgtcattgttgttattattattgtatatttctgttacataaagtctttcaaataagaaatccttgcatttttgtaacactgagtctattcagctccaattttcatccatgtttttaattattattatcctgattcttaattattataaattctatagcatatcctttggctttggaagctgagcagtaagagctgatgacttcctaacactaggtacaagttaaatgaacatttttacagtaactttgtttagaaagtaatctcttccacacaacagtgtagtgctggagagggcatgataaagatggcattaggcagagatgaggggaatacataaaggaggggaaaaagtaattcatacacaagggacggtgagttcaattcactttagtgaagaccctctaggagtaagatactgtgggaaaacagataccaataagtatatcatgcttgccctagagagtttgcaatctacctagagagaaaggaaggtgaaacttgagagatctatatacataggtaaagattgtagtgcatggttttgaggcacattatccctacaacaaattttgataacagaagac

SEQ ID NO: 48 - DNA, 1077 bp, Homo sapiens
acttttactatattctttgagatgactgtttttgatttagaggcgaaatcagcacgtggtggctcaaatctccttatggatagtgtttcttccttccagcttttcatgtttcaacttttgcggggcctggcgtacatccaccaccaacacgttcttcacagggacctgaaacctcagaacttactcatcagtcacctgggagagctcaaactggctgattttggtcttgcccgggccaagtccattcccagccagacatactcttcagaagtcgtgaccctctggtaccggccccctgatgctttgctgggagccactgaatattcctctgagctggacatatggggtgcaggctgcatctttattgaaatgttccagggtcaacctttgtttcctggggtttccaacatccttgaacagctggagaaaatctgggaggtgctgggagtccctacagaggatacttggccgggagtctccaagctacctaactacaatccagaatggttcccactgcctacgcctcgaagccttcatgttgtctggaacaggctgggcagggttcctgaagctgaagacctggcctcccagatgctaaaaggctttcccagagaccgcgtctccgcccaggaagcacttgttcatgattatttcagcgccctgccatctcagctgtaccagcttcctgatgaggagtctttgtttacagtttcaggagtgaggctaaagccagaaatgtgtgaccttttggcctcctaccagaaaggtcaccacccagcccagtttagcaaatgctggtgaaaagaaagggcgagatcaccaaggttcttccagggctgtatttctgcagtttcggttttcatttgcttcagcttactaagaagcttcaaatctaactccatactgaacaaggggctttatgtcctcacctatgacctggaatagtttaaatatggtgttcaaggcaatagtacataatagtggaagaaaattcagtggaaggttattgctattgtcatttgcatagaatttaagtgattgatttaaaaaaactggacataaactaagtctaagaag

SEQ ID NO: 49 - DNA, 911 bp, Homo sapiens
aaatggagttgctgatggagtgatcaaaagcgtattatggcaaacacttcaagctcttaatttctgtcatatacataactgtattcacagagatataaaacctgaaaatattctaataactaagcaaggaataatcaagatttgtgacttcgggtttgcacaaattctgattccaggagatgcctacaccgattatgtagctacgagatggtaccgagctcctgaacttcttgtgggagatactcagtatggttcttcagtcgatatatgggctattggttgtgtttttgcagagctcctgacaggccagccactgtggcctggaaaatcagatgtggaccaactttatctgataatcagaacactaggaaaattaatcccaagacatcaatcaatctttaaaagtaacgggtttttccatggcatcagtatacctgagccagaagacatggaaactcttgaggaaaagttctcagatgttcatcctgtggctctgaacttcatgaaggggtgtctgaagatgaatccagatgacagattaacctgttcccaactcctggagagctcctactttgattcttttcaagaggcccaaattaaaagaaaagcacgtaatgaaggaagaaacagaagacgccaacagaatcaactgttgcctctcataccaggaagccacatctcccccacacctgatggaagaaaacaagtcctccagttaaaatttgatcaccttccaaacatttaggaaaatgttctttcaagtgcaaagtaatttaatatgtacacattttgtacaagtgagataggaattctcagtgtttcaaatgcaaatgagccatatgaaaattaagatgccttctagaattggtttgctctgatcattgctgattcctttccccatgcttttacat

SEQ ID NO: 50 - DNA, 2615 bp, Murine sp.
gaaaatagccctgcgggaaatccgtatgctgaagttgaaacacccaaacctcgtgaacctcatcgaggtgttcagaagaaagagaaagatgcatctagtttttgagtactgtgatcacacactgttaaacgagctggagagaaacccaaacggagtttctgatggagtgattaaaagtgtgctatggcaaacccttcaagcccttaacttctgtcacaagcacaattgtattcatcgggatgtaaaacctgaaaacatcctaataaccaagcaagggatgataaagatttgtgactttggatttgcacgaattctaattccaggagacgcctacacagactatgttgccaccaggtggtaccgagcccccgaacttctcgtgggagacacgaagtacggttcctctgtagacgtgtgggccgtcggctgtgtttttgcagagctcctgacgggtcagccactctggccgggaaaatccgacgtggaccagctttacctgatcatcaggacgttggggaagctgattccaagacaccagtctatctttaggagtaaccagtttttccgcggcatcagcatacctgaaccagaggacatggagactcttgaagaaaaattctcaaatgttcagcctgtggctttaagtttcatgaagggatgcctgaagatgaatcctgatgagaggctgacctgtgcccagctgctggacagtgcctactttgagtcttttcaagaggatcaaatgaaaagaaaagcccgcagtgaggggagaagccgaaggcgccagcagaatcaactgctgcctcttattcctggaagccacatctcccccacacctgatggaaggaaacaagtcgtccagttaaagttcgatcatcttccaaacatttaggggactcatccttcccagcacatccttttaatattgtctacataggaataagacgggaatcctcagcatctcaaatacagtgagcgacgtgaacaccagggcacctctaatcaccacgggctcctcccctgtgctttttccacgccagctccatctcctaaaacattctctttaaatgttgcagtatcaaaatggcacatccgaaagagatgcttccagtttcaccagagccgggcttcctcaggcaatcggtactgtgcatctgtggacttatgctccgacctagggaaagatttccacgtagccgtctcacttcagccgaccagtggtgtcctgaagcagacccagatctgctggctgctgtttgtggaggggatggccctgagccctctcactggagtttcttctccgtgcagccaggtcttactttagactacatttgtgttattgtggcatggcaatcgtgaaaggtggtctaggtttacccttgactccacagcagatgctagtctccttctcgtgaggagctgacaagtctgcttctaaaacgaactagagaaaattccaaacgtgaccagttagtggacagactacaaggaatcgaccaccataccacagtaacgcccctggatccctggctgcccacccactctaaggctatcctggttcaccatggtttctctttcttttcttcttttttaatctatttgtacatatgagaaagaggcagaggggcgagagaaacctcgtgtgtgaaaatcaaaagacaagcaggaggccagcctaagctacatagcaaggccttttctctacacccattctctaaggttgcttaaacccaagtccctgctgctgattgtataaactatgaataagttctacatatgtaggacatattgttgtcattgttgaaatatctaaggatcttggtagaagcagaagtgttctaaatattctccacactggtgagtatcttggcatttcatttctgacctcatcacagatgaacacatcaaaggatgagtatgtatcactttgcatcttagaattctacctgttttagctgcgttaaaccttgtgaaagggcggggccataactgaacctgtggagttcttgcctgtgtgcaggaaaccctctggttttgtctccagcatggaagaaaacagctatagtcacacctacctgaaagtagaaattcaaagtcactgtccttgactacatatgcagtccaaggccacgctgggctacacttctccaggcatgaaggtccgtgtttgtatcaaggggcaggaaaggagagtccaaggtcaaggccagccgaggctgcatagtgagttgaggctcttcagcaaaagaaaagcaaactaataggagtcgttgaaggtagccaccggccatttctctaaatatcattctgctgaaaagggggcttagtttagtttagaatgcattaatgtatgtagaagctgggctatttcagattatttgaaattgtagctattgttaattagcacttaataactaactagcattatggtagtctaaactattagagtttactacaaagaggttttgattgaattatattaaacatataatatggattttaaaaatttaagatgtttaagaaagctatataaagattaaacatttttgtggctgtatatttgtgtatataccttggttgttctttaaattattttaataaaagccagaaacatt

SEQ ID NO: 51 - DNA, 4473 bp, Homo sapiens
atgcccaattcagagagacatgggggcaagaaggacgggagtggaggagcttctggaactttgcagccgtcatcgggaggcggcagctctaacagcagagagcgtcaccgcttggtatcgaagcacaagcggcataagtccaaacactccaaagacatggggttggtgacccccgaagcagcatccctgggcacagttatcaaacctttggtggagtatgatgatatcagctctgattccgacaccttctccgatgacatggccttcaaactagaccgaagggagaacgacgaacgtcgtggatcagatcggagcgaccgcctgcacaaacatcgtcaccaccagcacaggcgttcccgggacttactaaaagctaaacagaccgaaaaagaaaaaagccaagaagtctccagcaagtcgggatcgatgaaggaccggatatcgggaagttcaaagcgttcgaatgaggagactgatgactatgggaaggcgcaggtagccaaaagcagcagcaaggaatccaggtcatccaagctccacaaggagaagaccaggaaagaacgggagctgaagtctgggcacaaagaccggagtaaaagtcatcgaaaaagggaaacacccaaaagttacaaaacagtggacagcccaaaacggagatccaggagcccccacaggaagtggtctgacagctccaaacaagatgatagcccctcgggagcttcttatggccaagattatgaccttagtccctcacgatctcatacctcgagcaattatgactcctacaagaaaagtcctggaagtacctcgagaaggcagtcggtcagtcccccttacaaggagccttcggcctaccagtccagcacccggtcaccgagcccctacagtaggcgacagagatctgtcagtccctatagcaggagacggtcgtccagctacgaaagaagtggctcttacagcgggcgatcgcccagtccctatggtcgaaggcggtccagcagccctttcctgagcaagcggtctctgagtcggagtccactccccagtaggaaatccatgaagtccagaagtagaagtcctgcatattcaagacattcatcttctcatagtaaaaagaagagatccagttcacgcagtcgtcattccagtatctcacctgtcaggcttccacttaattccagtctgggagctgaactcagtaggaaaaagaaggaaagagcagctgctgctgctgcagcaaagatggatggaaaggagtccaagggttcacctgtatttttgcctagaaaagagaacagttcagtagaggctaaggattcaggtttggagtctaaaaagttacccagaagtgtaaaattggaaaaatctgccccagatactgaactggtgaatgtaacacatctaaacacagaggtaaaaaattcttcagatacagggaaagtaaagttggatgagaactccgagaagcatcttgttaaagatttgaaagcacagggaacaagagactctaaacccatagcactgaaagaggagattgttactccaaaggagacagaaacatcagaaaaggagacccctccacctcttcccacaattgcttctcccccaccccctctaccaactactacccctccacctcagacaccccctttgccacctttgcctccaataccagctcttccacagcaaccacctctgcctccttctcagccagcatttagtcaggttcctgcttccagtacttcaactttgcccccttctactcactcaaagacatctgctgtgtcctctcaggcaaattctcagccccctgtacaggtttctgtgaagactcaagtatctgtaacagctgctattccacacctgaaaacttcaacgttgcctcctttgcccctcccacccttattacctggaggtgatgacatggatagtccaaaagaaactcttccttcaaaacctgtgaagaaagagaaggaacagaggacacgtcacttactcacagaccttcctctccctccagagctccctggtggagatctgtctcccccagactctccagaaccaaaggcaatcacaccacctcagcaaccatataaaaagagaccaaaaatttgttgtcctcgttatggagaaagaagacaaacagaaagcgactgggggaaacgctgtgtggacaagtttgacattattgggattattggagaaggaacctatggccaagtatataaagccagggacaaagacacaggagaactagtggctctgaagaaggtgagactagacaatgagaaagagggcttcccaatcacagccattcgtgaaatcaaaatccttcgtcagttaatccaccgaagtgttgttaacatgaaggaaattgtcacagataaacaagatgcactggatttcaagaaggacaaaggtgccttttaccttgtatttgagtatatggaccatgacttaatgggactgctagaatctggtttggtgcacttttctgaggaccatatcaagtcgttcatgaaacagctaatggaaggattggaatactgtcacaaaaagaatttcctgcatcgggatattaagtgttctaacattttgctgaataacagtgggcaaatcaaactagcagattttggacttgctcggctctataactctgaagagagtcgcccttacacaaacaaagtcattactttgtggtaccgacctccagaactactgctaggagaggaacgttacacaccagccatagatgtttggagctgtggatgtattcttggggaactattcacaaagaagcctatttttcaagccaatctggaactggctcagctagaactgatcagccgactttgtggtagcccttgtccagctgtgtggcctgatgttatcaaactgccctacttcaacaccatgaaaccgaagaagcaatatcgaaggcgtctacgagaagaattctctttcattccttctgcagcacttgatttattggaccacatgctgacactagatcctagtaagcggtgcacagctgaacagaccctacagagcgacttccttaaagatgtcgaactcagcaaaatggctcctccagacctcccccactggcaggattgccatgagttgtggagtaagaaacggcgacgtcagcgacaaagtggtgttgtagtcgaagagccacctccatccaaaacttctcgaaaagaaactacctcagggacaagtactgagcctgtgaagaacagcagcccagcaccacctcagcctgctcctggcaaggtggagtctggggctggggatgcaataggccttgctgacatcacacaacagctgaatcaaagtgaattggcagtgttattaaacctgctgcagagccaaaccgacctgagcatccctcaaatggcacagctgcttaacatccactccaacccagagatgcagcagcagctggaagccctgaaccaatccatcagtgccctgacggaagctacttcccagcagcaggactcagagaccatggccccagaggagtctttgaaggaagcaccctctgccccagtgatcctgccttcagcagaacagatgacccttgaagcttcaagcacaccagctgacatgcagaatatattggcagttctcttgagtcagctgatgaaaacccaagagccagcaggcagtctggaggaaaacaacagtgacaagaacagtgggccacaggggccccgaagaactcccacaatgccacaggaggaggcagcagcatgtcctcctcacattcttccaccagagaagaggccccctgagccccccggacctccaccgccgccacctccaccccctctggttgaaggcgatctttccagcgccccccaggagttgaacccagccgtgacagccgccttgctgcaacttttatcccagcctgaagcagagcctcctggccacctgccacatgagcaccaggccttgagaccaatggagtactccacccgaccccgtccaaacaggacttatggaaacactgatgggcctgaaacagggttcagtgccattgacactgatgaacgaaactctggtccagccttgacagaatccttggtccagaccctggtgaagaacaggaccttctcaggctctctgagccaccttggggagtccagcagttaccagggcacagggtcagtgcagtttccaggggaccaggacctccgttttgccagggtccccttagcgttacacccggtggtcgggcaaccattcctgaaggctgagggaagcagcaattctgtggtacatgcagagaccaaattgcaaaactatggggagctggggccaggaaccactggggccagcagctcaggagcaggccttcactgggggggcccaactcagtcttctgcttatggaaaactctatcgggggcctacaagagtcccaccaagagggggaagagggagaggagttccttactaa

SEQ ID NO: 52 - DNA, 1866 bp, Homo sapiens
  modified_base (666): a, t, c, g, other or unknown
tgaaaatggagatgtatgaaacccttggaaaagtgggagagggaagttacggaacagtcatgaaatgtaaacataagaatactgggcagatagtggccattaagatattttatgagagaccagaacaatctgtcaacaaaattgcgatgagagaaataaagtttctaaagcaatttcatcacgaaaacctggtcaatctgattgaagtttttagacagaaaaagaaaattcatttggtatttgaatttattgaccacacagtattagatgagttacaacattattgtcatggactagagagtaagcgacttagaaaatacctcttccagatccttcgagcaattgactatcttcacagtaataatgtaatcattcatcgagatataaaacctgagaatattttagtatcccagtcaggaattactaagctctgtgattttggttttgcacgaacactagcagctcctggggacatttatacggactatgtggccacacgctggtatagagctcccgaattagtattaaaagatacttcttatggaaagtatgtgcctgtggatatctgggctttgggctgtatgatcattgagatggccactggaaatccctatcttcctagtagttctgatttggatttactccataaaattgttttgaaagtgngattcatgccagaactgaaagctaaattactgcaggaagcaaaagtcaattcattaataaagccaaaagagagttctaaagaaaatgaactcaggaaagatgaaagaaaaacagtttataccaatacactgctaagtagttcagttttgggaaaggaaatagaaaaagagaaaaagcccaaggagatcaaagtcagagttattaaagtcaaaggaggaagaggagatatctcagaaccaaaaaagaaagagtatgaaggtggacttggtcaacaggatgcaaatgaaaatgttcatcctatgtctccagatacaaaacttgtaaccattgaaccaccaaaccctatcaatcccagcactaactgtaatggcttgaaagaaaatccacattgcggaggttctgtgacaatgccacccatcaatctaactaacagtaatttgatggctgcaaatctcagttcaaatctctttcaccccagtgtgaggttaactgaaagagcaaaaaagagacgcacttcttcacaatctattggacaagttatgcctaatagcaggcaagaggatccaggtcctattcaaagccaaatggagaagggtatatttaatgagcgaacaggtcacagtgaccaaatggcaaatgagaacaaaaggaagctgaatttttccagatctgacaggaaagaattccattttccagaattgcctgtcacaatacagtcaaaagatacaaaaggaatggaagttaaacagataaaaatgctgaagagggagtcaaagaaaacagagtcatctaagataccaactttacttaacgtggatcaaaatcaagaaaaacaagagtttattcccttatctctgctgtctgcctgctgtcctattttcacaaatatttgctctcagctaactatcagggtggagatggccattgcgaggggaagaatttgaagagaaacaggttttttttctggtagtgtcttttcttttacatagtccaaaaaatacaagatgacaactcttcccgttttatttatctacaatagaagtgtgatgtgagttgttgttaagacagccatccatgtgcatgagcatcatccagctttttttgttagcaaaacatttactgttttcttttcccttttaagactctgttgatgtgataatttgatttggaattataaagtcatctcttctctgccttgaa

SEQ ID NO: 53 - DNA, 1688 bp, Murine sp.
ctggcagatatagttcatgcttgtttacaaattgatcctgctgagaggacatcatctactgatcttttgcgtcacgattactttactagagatggatttattgagaaattcataccagagctgagagctaaattattacaggaagcaaaggttaattcatttataaagccaaaagagaattttaaagaaaatgaacctgtgagagatgagaagaaatcagtttttaccaacaccctgctctatggaaatccatcactttatggcaaggaagtggacagagacaaaagggccaaggagctcaaagtcagagtcattaaggccaaagggggcaaaggagatgtcccagaccagaagaagccagagtatgaaggcgaccaccgccagcagggcacagctgatgacacacagccctcatcactggacaagaagccttctgtcttggaactgacaaaccctctcaatcccagtgagaattctgacggtgtcaaagaagacccacacgctgggggttgtatgataatgccacctatcaacctgacaagcagtaatttgttggccgcaaatctcagttcaaacctttcccaccccaattcacggttaactgaaagaacaaaaaagagacgcacttcttcacaaactattggacagactttgtctaatagcagacaagaggacacaggtcccacacaagtccaaacagagaaaggtgcatttaatgagcgaacaggtcagaatgaccaaatatcgagtgggaacaaaagaaagctgaattttcccaaatgcgacaggaaagaattccatttccctgaactgccattcacagtgcaggcgaaggagatgaaagggatggaagttaaacagataaaagtgctgaagagagaatcaaagaaaacagattcatctaaaataccaactttacttagtatggacccaaatcaagaaaaacaagagggtggagatggcgattgtgaggggaagaatttgaagaggaacagattttttttttcccgatagtgctttgtcttttaagtaatcttaaaaatacaagcttgacaattccttcctttttattttatatacactagaatgtacataggttgctgctaagatagccacccatcccatctgcatcaacatcatctatttttttggttttgctagcaaaattttcacaatttttctctatcttccaaaaactgttattttgatgctgtgatttgaaattataaagtcacctcctctgtctgcttccttccttgccatgattactgagtgggtagtcacatgatgtgccctgctcgcactgctctcagactgctgagactcaaacctcataagccaggggtctcctgggaagcactggcctcttcaagtggatgctcgatgaaccttcttatctgttgtcttagtaaccactcgttgccatcacatgatgaaagacattctattgtccccagtgaagcatttatagtacttacataacatgttacagtgatatgatgttcctaggttaaactccttgagatgaaactatttcctgcattctctgactcccctagtctaatagttccttccatttagccagaagaatttcctgaagaagcgatgcacaacctgggaaaggtttactttctatcctgggctgttttctgttgctaaataatatagactgggtagttagttaacat

SEQ ID NO: 54 - DNA, 1380 bp, Murine sp.
agcgcctcaggccagctcaagatagctgactttggcctggcccgggtcttctctccggatggtggtcgcctctacacacatcaggtggccaccaggtggtaccgagctcctgaactcctgtatggcgctcggcagtatgaccagggcgttgacctatgggctgtgggctgcatcatgggagagctgttgaatgggtcccccctgttcccgggcgaaaacgacattgaacaactgtgctgtgtgcttcgcatcctgggtaccccgagtcctcgagtctggccggagatcacagagctgcctgactacaacaagatctccttcgaggagcaggcaccagtgcccctggaggaggtgctgcctgatgcctctccccaggccttggacctgctgggccagttcctcctctaccctccacgacagcgtattgcagcctcccaggcccttctgcatcagtacttcttcacagcgcctctgcctgcccatccatccgagctgccaattcctcagcgcccagggggacctgcacccaaggctcacccagggcccccccatgtccacgacttccatgtggatcgacctattgaggagtcactgttgaacccagaactgattcggcccttcatcccagaggggtgagatgctggtccaggccttcctgctcgccctaggagcacctctttctgatttgcctccatggcctccccacggctatatataccacacctggtcctgctcctgagtgtgcttgagggctgggctctgggaggcagaaccgtgagatgttcatcccagcagagaaagagactcacgtcctacagacaaagcctccagaaactgctagctgtgtccttctccagggccacccctcagtggtgccacccggccttagagatgattgtcaggctctgtcccctcttcaaggacattggtactacagcaccacctggtggaagcacagagtataagctgtcttcatactggggacacagctgggaagtcagacatgttttagttttggttccactgggtcaggatttgaggttcatataaaagccctgggtgtttctgtctaattgcaccttgtctgttgctgttagggaaaggacaatggtgggccttgattcacaggggtcaggtactcagaaggggcctcctgtgaaggccatttgggtcctcaggcttcccatgctattcacgggacttgagtgctcatttgggagcgagggtccagaagctgaggcccagggatggacagtccagttcccgaagcccacttcccacatgtcgggtgggtcagtcagtgagcctgaggctgccttgcagatgcggaagcaggcattcctggaatccactcagtaaataaattccagtgtgactcag

SEQ ID NO: 55 - DNA, 2488 bp, Homo sapiens
  modified_base (562): a, t, c, g, other or unknown
gaacaacaataacagaataaggaagaaaatctcatgattacctcaataagtacagagaaatctggtcacactcactatccattcatgattacaactcttcaatactatcgcggccgaggagggaagacggcagtttggcgacatttctcggccgaagggccatttgcttttgcggagatgcggcattccaaaagaactcactgtcctgattgggatagcagagaaagctggggacatgaaagctatcgtggaagtcacaagcggaagaggagatctcatagtagcacacaagagaacaggcattgtaaaccacatcaccagtttaaagaatctgattgtcattatttagaagcaaggtccttgaatgagcgagattatcgggaccggagatacgttgacgaatacaggaatgactactgtgaaggatatgttcctagacattatcacagagacattgaaagcgggtatcgaatccactgcagtaaatcttcagtccgcagcaggagaagcagtcctaaaaggaagcgcaatagacactgttcaagtcatcagtcacgttcgnatgaaatcgtggacactttgggtgaaggagcctttggcaaagttgtagagtgcattgatcatggcatggatggcatgcatgtagcagtgaaaatcgtaaaaaatgtaggccgttaccgtgaagcagctcgttcagaaatccaagtattagagcacttaaatagtactgatcccaatagtgtcttccgatgtgtccagatgctagaatggtttgatcatcatggtcatgtttgtattgtgtttgaactactgggacttagtacttacgatttcattaaagaaaacagctttctgccatttcaaattgaccacatcaggcagatggcgtatcagatctgccagtcaataaattttttacatcataataaattaacccatacagatctgaagcctgaaaatattttgtttgtgaagtctgactatgtagtcaaatataattctaaaatgaaacgtgatgaacgcacactgaaaaacacagatatcaaagttgttgactttggaagtgcaacgtatgatgatgaacatcacagtactttggtgtctacccggcactacagagctcccgaggtcattttggctttaggttggtctcagccttgtgatgtttggagcataggttgcattcttattgaatattaccttggtttcacagtctttcagactcatgatagtaaagagcacctggcaatgatggaacgaatattaggacccataccacaacacatgattcagaaaacaagaaaacgcaagtattttcaccataaccagctagattgggatgaacacagttctgctggtagatatgttaggagacgctgcaaaccgttgaaggaatttatgctttgtcatgatgaagaacatgagaaactgtttgacctggttcgaagaatgttagaatatgatccaactcaaagaattaccttggatgaagcattgcagcatcctttctttgacttattaaaaaagaaatgaaatgggaatcagtggtcttactatatacttctctagaagagattacttaagactgtgtcagtcaactaaacattctaatatttttgtaaacattaaattattttgtacagttaagtgtaaatattgtatgttttgtatcaatagcataattaacttgttaagcaagtatggtcttgataatgcattagaaaaattaaaattaatttttctttttgaaattaccatttttaaatacctttgaaatatcctttgtgtccagtgataaatgtgattgatcttgccttttgtacatggaggtcacctctgaagtgattttttttgagtaaaaggaaatcttgactactttatattcttaaaggaatattctttatatacttcaaatttagaacttaactttaaaagtttttcttctgtaattgttgaacgggtgattattattaactctagataagcaggtactagaaaccaaaactcagaaaatgtttactgttagaattctattaaattttaagtgttgtattctttttcattgggtgatgtcagggtgataaccagacattcatggaaaggcatgcagtttgtccattgtgacagtttgtttaataaaaccacatacacactttatttaagattaaaatctaactggaaagtcagcttggaaaatggacatttccaagtatgtttggtgagtcacagatataaaaatagaaattctgatgagaggtttcagtttttaataccaagtccttaggagtcttaacattggccagcatctgtttatcaaatgacataaatacgtaaacctataagaattaagtttattaattaggcaatttatgtctgtgataattcttacgggagaaagaggatttgattggaaagcagtttgggaagaaagtgctgctgaaatttccagaatttaattgattggttacataaactttttgacttcaat

SEQ ID NO: 56 - DNA, 1828 bp, Homo sapiens
  modified_base (1708): a, t, c, g, other or unknown
agtaaggccccgcgggcgtcctggccgccatgtgcaccgtagtggaccctcgcattgtccggagatacctactcaggcggcagctcgggcaggggagaacattccgggaaatcacgctcctccaggtgagtggcctgggccctccagtccaatccccttgcccaggtacagatctctccagacaggagagaaactggccttcttgggccccagagcacagcccctcctggccttccagccgcctccgactctctccccaggagtttggggaccatcccaacatcatcagcctccttgacgtgatccgggcagagaacgacagggacatttacctggtgtttgagtttatggacactgacctgaacgcagtcatccggaagggcggcctgctgcaggacgtccacgtgcgctccatcttctaccagctcctgcgggccacccggttcctccactcggggcacgttgtgcaccgggaccagaagccgtccaatgtgctcctggatgccaactgcacagtgaagctgtgtgactttggcctggcccgctccctgggcgacctccctgaggggcctgaggaccaggccgtgacagagtacgtggccacacgctggtaccgagcaccggaggtgctgctctcttcgcaccgctacaccgcttcctgccccagatacacccttggggtggacatgtggagtctgggctgtatcctgggggagatgctgcgggggagacccctgttccccggcacgtccaccctccaccagctggagctgatcctggagaccatcccaccgccatctgaggagaggccacgacagacgctggatgccctcctaccgccagacacctccccagaggccttggacctccttaggcgactcctggtgttcgccccggacaagcggttaagcgcgacccaggcactgcagcacccctacgtgcagaggttccactgccccagcgacgagtgggcacgagaggcagatgtgcggccccgggcacacgaaggggtccagctctctgtgcctgagtaccgcagccgcgtctatcagatgatcctggagtgtggaggcagcagcggcacctcgagagagaagggcccggagggtgtctccccaagccaggcacacctgcacaaacccagagccgaccctcagctgccttctaggacacctgtgcagggtcccagacccaggccccagagcagcccaggccatgaccctgccgagcacgagtccccccgtgcagccaagaacgttcccaggcagaactccgctcccctgctccaaactgctctcctagggaatggggaaaggccccctggggcgaaggaagcgccccccttgacactctcgctggtgaagccaagcgggaggggagctgcgccctccctgacctcccaggctgcggctcaggtggccaaccaggccctgatccggggtgactggaaccggggcggtggggtgagggtggccagcgtacaacaggtccctccccggcttcctccggaggcccggcccggccggaggatgttcagcacctctgccttgcagggtgcccaggggggtgccagggctttgcttggaggctactcccaagcctacgggactgtctgccactcggcactgggccacctgcccctgctggaggggcaccatgtgtgagccgccctactcccttcacctggccctctgttcctgccccagcnccttccccagacccctctccagtctcctgcaccccttagccctccctgctttgcctggcccgttgaagttccagggagcttgcccgggtctcctcgggggagcagatgagggccctgccc

SEQ ID NO: 57 - DNA, 1260 bp, Homo sapiens
atgaagaactataaagcaattggcaaaataggagagggaacgttttctgaagttatgaagatgcaaagcctgagagatggaaactactatgcatgtaaacaaatgaagcagcgctttgaaagtattgagcaagtcaacaacctacgagagatccaagcactgaggcgcctgaatccgcacccaaacattcttatgttgcatgaagtggtttttgacagaaaatctggttctcttgcactaatatgtgaacttatggacatgaatatttatgagctaatacgagggagaagatacccattatcagaaaaaaaaattatgcactatatgtaccagttatgtaagtccctggatcatattcacagaaatggaatatttcacagagatgtaaaaccagaaaatatactaataaagcaggatgtcctgaaattaggggactttggctcctgccggagtgtctattccaagcagccgtacacggaatacatctccacccgctggtaccgggccccggagtgtctcctcactgatgggttctacacgtacaagatggacctgtggagcgccggctgtgtgttctacgagatcgccagtctgcagcccctctttcctggagtaaatgaactggaccaaatctcaaaaatccacgatgtcatcggcacacccgctcagaagatcctcaccaagttcaaacagtcgagagctatgaattttgattttccttttaaaaagggatcaggaatacctctactaacaaccaatttgtccccacaatgcctctccctcctgcacgcaatggtggcctatgatcccgatgagagaatcgccgcccaccaggccctgcagcacccctacttccaagaacagaggaaaacagagaagcgggctctgggcagccacagaaaagctggctttccggagcaccctgtggcaccggaaccactcagtaacagctgccagatttccaaggagggcagaaagcagaaacagtccctaaagcaagaggaggaccgtcccaagagacgaggaccggcctatgtcatggaactgcccaaactaaagctttcgggagtggtcagactgtcgtcttactccagccccacgctgcagtccgtgcttggatctggaacaaatggaagagtgccggtgctgagacccttgaagtgcatccctgcgagcaagaagacagatccgcagaaggaccttaagcctgccccgcagcagtgtcgcctgcccaccatagtgcggaaaggcggaagataa

SEQ ID NO: 58 - DNA, 1899 bp, Homo sapiens
atgaatagatacacaacaatcaggcagctcggggatggaacctacggttccgtcctgctgggaagaagcattgagtctggggagctgatcgctattaaaaaaatgaaaagaaaattttattcctgggaggaatgcatgaaccaacgggaggttaagtctttaaagaagctcaaccatgccaatgtagtcaaattaaaagaagttatcagggaaaatgatcatctttattttatcttcgagtacatgaaggaaaatctttaccagctcattaaagagagaaataagttgtttcctgagtctgctataaggaatatcatgtatcagatattacaaggactcgcatttattcacaaactcggcttctttcatcgagacttaaagcctgagaacctcctctgcatgggaccagaacttgtgaaaattgcagactttggtttggcccgagaaatacgatcaaaacctccatatacagattatgtatctaccagatggtacagggctccagaagtactcctgaggtctaccaactacagctcccccattgacgtctgggcggtgggctgcatcatggcagaagtttacaccctcaggccactcttccctggagccagtgaaattgacacaatattcaaaatttgccaagtgctggggacaccaaaaaagactgactggcctgaaggctatcaactttcaagtgcaatgaacttccgttggccacagtgtgtacccaataacttaaagaccttgattcccaatgctagcagtgaagcagtccagctcctgagagacatgcttcagtgggatcccaagaaacgaccaacagctagtcaggcacttcgatatccttacttccaagttggacacccactaggcagcaccacacaaaaccttcaggattcagaaaaaccacagaaaggcatcctggaaagggcaggcccacctccttatattaagccagtcccacctgcccagccaccagccaagccacacacacgaatttcttcacgacagcatcaagccagccagccccctctgcatctcacgtacccctacaaagcagaggtctccaggacagatcacccaagccatctccaggaggacaagccaagcccgttgcttttcccatccctccacaacaagcatccacagtcgaaaatcacagctggcctggagcacaaaaatggtgagataaagccaaagagtaggagaaggtggggtcttatttccaggtcaacaaaggattcagatgattgggctgacttggatgacttggatttcagtccatccctcagcaggattgacctgaaaaacaagaaaagacagagtgatgacactctctgcaggtttgagagtgttttggacctgaagccctctgagcctgtgggcacaggaaacagtgcccccacccagacgtcatatcagcggcgagacacgcccaccctgagatctgcagccaagcagcactatttgaagcactctcgatacttgcctgggatcagtataagaaatggcatactctcgaatccaggcaaggaatttattccacctaatccatggtctagttctggcttgtctggaaaatcttcagggacaatgtcagtaatcagcaaagtaaattcagttggttccagctctacaagttctagtggactgactggaaactatgtcccttcctttctgaaaaaagaaatcggttctgctatgcagagggtacacctagcacctattccagacccttcccctggttattcctccctgaaggccatgagacctcatcctgggcgaccattcttggacacccagcctagaagcactcctgggttgataccacggcctccagccgcccagccagtgcatggccggacagactgggcttccaagtacccatcccggcggtga

SEQ ID NO: 59 - DNA, 1776 bp, Murine sp.
agcagcaacaatggtggcatgagtgcagaggaggagatagggcctggggctgagcctatgagaggaccaagcttggctacaagggactggagagatgagactgttgggaccacagacctgcagcaaggcatagacccaggagcagtgagccctgagcctgggaaggaccacgcagcccagggcccaggaagaactgaagctggaagggtatcttctgctgcagaggctgccattgtggttctagatgacagcgcagcacccccagccccttttgaacaccgggtagtgagcatcaaagataccctgatctcagcaggctacacggtatcccaacatgaagtcttaggagggggtcggtttggccaggtgcacaggtgtacagagaggtctacaggccttgcactggcagccaagatcatcaaagtgaagaacgtaaaggaccgggaggatgtgaagaatgaggtcaacatcatgaaccagctcagccacgtaaacttgatccaactttatgatgcgtttgagagcaagaacagcttcactctgatcatggagtatgtggatggaggcgaactctttgaccggatcacggatgagaagtaccacctcactgagttggatgtggtcttgttcacgaggcagatctgtgagggtgtgcattacctgcatcagcactatatcctgcacctggacctcaagcctgagaacatattgtgtgtcagccagacagggcatcaaattaagatcattgactttgggctggctagaagatacaagcctcgggagaagctaaaggtgaactttggtactccggagttcctggccccagaagttgttaactatgagtttgtgtcatttccaacagacatgtggagtgtgggagttatcacctacatgctactcagtggtttgtccccatttctaggggagacagatgcagagaccatgaattttattgtgaactgcagctgggatttcgatgctgataccttcaaagggctgtcggaggaagccaaggactttgtttcccggttactggtcaaagagaagagctgtaggatgagcgccacacagtgcctgaaacacgagtggttaaatcacctgcctgccaaagcctcgggctccaacgttcgcctcagatcccaacaactgctgcagaaatatatggctcagagtaaatggaagaaacatttccacgtggtggctgcagtcaacaggctacggaaatttccaacgtgtccctaatcttcaactctggtgttccactgggcctgggaattcttgaggcaacacgaagtggtaatatgaagagattactcaagattttatgtagattggcgctttgctattattgatttttcttattttgcaaagaatgatggaaggaagcaagaaagaaagaaaagaagaaaagggggaagaaaaggaaaaggcagaaagcaaggaaacaggctacgttgttgctcttcttgtaggtgaaagtgtttttattaaaagccctaggaatgtttttctgcctcgtaaggtcagcaggtctcatatgctgcttgctaccccgcacccttccttttggtaataagagcaggcacgctcaggatgggcagggaaatcctacttggcttttggtcaaatttgaattctaaacttgtcatgattaaagaagccagtagggagggaggtatggaagagggaggaattaggtccaacagtgggggatgaatttgaccgaaacattgtataaaattcttaaagaattaataaaatatatttttaaaggag

SEQ ID NO: 60 - DNA, 1428 bp, Homo sapiens
ggaacctcaggcttcagagagccgaaaagttgggaggcgtaaccacttacaggccggaagtgtccggggtggacgcattcgggtagccgaagaagtcccaggattgccgaagaagtcccaggatttccgaagcgagccgaagcatcgcgacagttttcagagacagctgatcggttggagctgttgcgccgagcagtcatggcggcggccagagctactacgccggccgatggcgaggagcccgccccggaggctgaggctctggccgcagcccgggagcggagcagccgcttcttgagcggcctggagctggtgaagcagggtgccgaggcgcgcgtgttccgtggccgcttccagggccgcgcggcggtgatcaagcaccgcttccccaagggctaccggcacccggcgctggaggcgcggcttggcagacggcggacggtgcaggaggcccgggcgctcctccgctgtcgccgcgctggaatatctgccccagttgtcttttttgtggactatgcttccaactgcttatatatggaagaaattgaaggctcagtgactgttcgagattatattcagtccactatggagactgaaaaaactccccagggtctctccaacttagccaagacaattgggcaggttttggctcgaatgcacgatgaagacctcattcatggtgatctcaccacctccaacatgctcctgaaaccccccctggaacagctgaacattgtgctcatagactttgggctgagtttcatttcagcacttccagaggataagggagtagacctctatgtcctggagaaggccttcctcagtacccatcccaacactgaaactgtgtttgaagcctttctgaagagctactccacctcctccaaaaaggccaggccagtgctaaaaaaattagatgaagtgcgcctgagaggaagaaagaggtccatggttgggtagaagaatgtgtatgacaaccacacacagtgaagctcttttttcaaagtaaatttgaagaaatgctacaagtatgagatgagatctaagtaaaggtgttaagatatttttaagtggtatgtgatcgtgtcattatcatctgcacttcactcaagagcttactatgtgtctaagtcatgttctaggcagaattgggtatttaaagtaaattgaggacaggcttctcccagattgtgacatgtatatctcagatacatgggtgtggcattgaaccacataatgagaacattattctctttttagtccttgtgagacaaggatgaagtctcagttgctgatactcgctgagcttactggccctctaacccagtgtttttttttgttgttgttgtgtacatgttatatttattttgaaaccagtttaatgggatacaaccagcattttaaaaaatgaaatagaatacagcatgg

SEQ ID NO: 61 - DNA, 3304 bp, Homo sapiens
cagagagagaaggtaaaccaagggaacatgccagggcttcagagcaccttcctagccatggacacggaggagggggtagaggtggtgtggaacgagctccacttcggagacaggaaggccttcgcggcgcacgaggagaagatccagaccgtgttcgagcagctggtgctggtggaccacccgaacatcgtgaagttgcacaagtactggctggatacctctgaggcctgcgcgagggtcatcttcatcacagagtacgtgtcatcaggcagcctcaagcaattcctcaaaaagaccaagaagaaccacaaggccatgaacgcccgggcctggaagcgctggtgcacgcagatcctgtctgcgctcagcttcctgcacgcctgcagccccccaatcatccacgggaacctgaccagcgacaccatcttcattcagcacaacggcctcatcaagatcggctccgtgtggcaccgaatcttctccaatgcacttccagatgatctccgaagccccatccgcgctgagcgagaggaacttcggaacctgcacttcttccccccagagtatggagaggtggccgatgggaccgctgtggacatcttctcctttgggatgtgtgcgctggagatggctgtactggaaatccagaccaatggggacacccgggtcacagaggaggccattgctcgcgccaggcactcgctgagtgaccccaacatgcgggagttcatcctttgctgcctggcccgggaccctgcccgccggccctctgcccacagcctcctcttccaccgcgtgctcttcgaggtgcactcgctgaagctcctggcagcccactgcttcatccagcaccagtacctcatgcctgagaatgtggtggaggagaagaccaaggccatggacctgcacgcggtcttggcggagcttccccggccccgcaggcccccgctgcagtggcggtactcggaagtctccttcatggagctggacaaattcctggaggatgtcaggaatggaatctacccactgatgaactttgcagccactcgacccctggggctgccccgtgtgctggccccacccccggaggaggtccaaaaggccaagaccccgacgccagagccctttgactctgagaccagaaaggtcatccagatgcagtgcaacctggagagaagcgaggacaaggcgcgctggcatctcactctgcttctggtgctggaagaccggctgcaccggcagctgacctacgacctgctcccaacggacagcgcccaggacctcgcctcggagctcgtgcactatggcttcctccacgaggacgaccggatgaagctggccgccttcctggagagcaccttcctcaagtaccgtgggacccaggcctgacccggagccccagccccaggggaccatgccggggtgctgcccgggcaggccatgttggggagactccagcaccgtggggctgccctcctccatgcgcctgggagcacaaaggccccggtagtgaaggaaccccccgtctcctgagagtggggctgaccctgccttgggcgccgaggggttggggggtgggtgtgggggagccgttaggcctcccaggtccttaggatcagggttgcccccagaaccccttcccatatcctccattctccgccctgagttcctacccaggctgcctggctggggccactgcctcctcagcatgcaggaggctgccctgtagggaaccccagctctggggcttgggggtgagggtcagccctggacagacctctgcccagggaactgctccatggggtctgggagagcagccatcccctgctggcaccatagacccacacaaggagcctgcacagcaagccagcggtgacacacctgcaggtgtcaggcatggcactgggcacaacagggacctggcaggagaaacagaccacagagaggtctggagttgaggctgttgtcagcaaagcccctggtcccacacagctctgccctagagccacctctttgaccctttacccaccctgagaccagaacttgcagcccctctgcagatctcctctggccactgcagcccctccaatgggctttttctctcatgcattccctggcctggaggcgtcagggaccccacatcctccctgctcctcagactcacagcccctccatgttacctcccgcacctcctccctggggcagctgctccctgggcctctgaggatgtcagctcctggctccctgcctctctcccactccactcctggctcagtcttagagatttctatgccctcatggattctacccctgccttcctggcctcttgattcttggcttgcctctcctccaattccaaacttagtgaaatggccttaagcattttaaactgtatgtatacattagcgcattcatgcctttctaaacgcatttcaaatgtcaaccaggaaggcacaccactgtattagttttatactgccgctgtaaaatttaccacaaacttagtgacttaacacaaatttattgcaattctgtaggctggaagtctgactatgggtctcactggactagaatcaaggctggcaggctgccttccttcctggaggttctaggggagactctgtctcctgctccttcaggctgctggcagaatccacatcctttcggtggcagggccaaggtccccactttcttgctgactgtaaactaaggccacttccagcttgtagaggctgcctacattccttggctcttggccccctcctccatcttcagagctagcaggttcagtctgtgtcacgaaccatttctctggttccctgcagacaggaaaggttgtccctaaggactcatgagattaggttgggcccagccagataatacatgataatctccctcctcaaggtttttaatattaaacacatctgcaggacacattttgccatgtaaactaacattcactggttccagggattaaggaatgaacctcttttgttggggaagggtggcattctgctgaccacagcactccaaccaaaagccaaaaaccaaagcaagacttactaacgcatatcaaataaattaaaggtacaaaatcgtgaatctcagttatcttaaatattccaatactatttacaaaattattcaaattctcacgccttccaactcaaaattagcaatctaaagtaatttccatatcctagatggaaaccctcatgctaaactgtctgattatgcatggttctaaatggtttcagtggcaaatacataacattgtactactgattaaactgaacttaaaagc

SEQ ID NO: 62 - DNA, 2328 bp, Murine sp.
ccacgcgtccgcaccagagtatggcgaagtcaatgatgggactggctttgtggacatcttctccttcgggatgtgtgcactggagatggctgtactcgagatccaagccaacggggataccagagtcacagaagaggccatcgctcgagccaggcactcactgagtgaccccaacatgcgggaattcatcctctcctgcctggcccgggaccctgcccgccgaccctcagcccacaacctcctcttccaccgagtgctctttgaggtgcactcgctgaagctgctggcagctcactgcttcatccagcaccagtacctcatgcctgagaatgtggtagaggaaaagaccaaggccatggacctccatgcagttttggctgagatgccgcagccccatggacccccaatgcagtggcggtactcagaggtctccttcttggagctggacaaattcctagaggatgtcaggaacgggatctatccactgatgaactttgcggctgctcggcccttggggcttccccgtgtgttggccccacccccagaggaagcccaaaaggccaaaactccaacgccagaaccctttgactcggagaccaggaaggtggtccagatgcagtgcaacctggaaagaagcgaggacaaggctcggtggcaccttactctgctcttggtgcttgaggaccggctacatcggcagctgacctatgatctgctcccaacggacagtgcccaggacctcgctgctgaactagtgcattatggcttcctgcacgaggatgacaggacaaagctagcagcctttctggagaccacttttctcaagtaccgagggacgcaagcgtgaccttcccagtcctgacggcccagcagagatacaggggctcagggttgtccacttggcaaagagcccccacactgctcaaagctgccttctgcctgtgttccctggaactgaacacaggccctgctagtgaagacacccccaccccccagctttctgcagcagtgtgggaccctggggtggtgatggagccctgagcctggacgagagtggatacaggtcagttaggggaaccgctccatctggtactagacaacagccatgccttcaggtggcatagaaacctagggaaggagcctgaactcaggtgtcacagtgctgggcatcaggcagaccagacctgacctgattggagaactgtagactagatagcttggagttgaacccatggccagggaattccttggtcctgctcagaccagtcctgatcccttgcagacctgccttgagccctctttctgatcttccacactcttgagaccaggacctgtgtcctccccaaagcccttgggaaggatctttctattcatcatccctctggcctaggggctcaggggtcaggcatcctccacattccctccctggggaagttgtgtgtttgagttgaggatgtgggttcctggctccctctttctccccagcccaacttgtctctttcttactggtttcaaagtcctgatgaacgcttcccctcagagccaccctggtttccttggttcttgaactgcctctctcccaacttcaaaccaggtcttaaacgttttttaaatgcatatataaatgtaatgcagtcacggtcctttttaaacactttgtgtatgaaaccaggaaagctcactattgtattaggaatagttccacattgctgctgttaacagatatcataaacccagtggtttgagacgacacacacacacacacacacacacacacacagagagagagagagttctgtacatcaagtgtgatccaggctctcactagattaatacccaggctaagttcctttctggaagctgggacttacctcctgctccttcaagctattggcagaactcacttccctgcaatggtaaggcagaaatccctattttctcaacagctgccaactaagaacccctctcagcttctagaggccaccaacttttcttagttcttctttctcccccctcaagaccagcagcgtcaagttgaatctttgtcctgggctagctgactggcttgccactgctgggaagagttggggccttttgtgagtaggttggacccaccaggataaccgaggatgatccccttctcagggtctatagatgaaccacacctgcgcagttccttctgctgtcatcctgggctttggtgcttggagaacagccgtgggcggtgggtgttgttactgtggtacctaccatgccatcttaaccgaaaccaagacctaaaataaaacagatttgtcatgggacatctaataaattaaatgaactctg

SEQ ID NO: 63 - DNA, 7328 bp, Homo sapiens
  modified_base (2083)..(2084): a, t, c, g, other or unknown
cacgaatccgagcccgctcgcctctctccagcgaaccgaccatgtctggcggcgccgcagagaagcagagcagcactcccggttccctgttcctctcgccgccggctcctgcccccaagaacggctccagctccgattcctccgtgggggagaaactgggagccgcggccgccgacgctgtgaccggcaggaccgaggagtacaggcgccgccgccacactatggacaaggacagccgtggggcggccgcgaccactaccaccactgagcaccgcttcttccgccggagcgtcatctgcgactccaatgccactgcactggagcttcccggccttcctctttccctgccccagcccagcatccccgcggctgtcccgcagagtgctccaccggagccccaccgggaagagaccgtgaccgccaccgccacttcccaggtagcccagcagcctccagccgctgccgcccctggggaacaggccgtcgcgggccctgccccctcgactgtccccagcagtaccagcaaagaccgcccagtgtcccagcctagccttgtggggagcaaagaggagccgccgccggcgagaagtggcagcggcggcggcagcgccaaggagccacaggaggaacggagccagcagcaggatgatatcgaagagctggagaccaaggccgtgggaatgtctaacgatggccgctttctcaagtttgacatcgaaatcggcagaggctcctttaagacggtctacaaaggtctggacactgaaaccaccgtggaagtcgcctggtgtgaactgcaggatcgaaaattaacaaagtctgagaggcagagatttaaagaagaagctgaaatgttaaaaggtcttcagcatcccaatattgttagattttatgattcctgggaatccacagtaaaaggaaagaagtgcattgttttggtgactgaacttatgacgtctggaacacttaaaacgtatctgaaaaggtttaaagtgatgaagatcaaagttctaagaagctggtgccgtcagatccttaaaggtcttcagtttcttcatactcgaactccacttatcattcaccgcgatcttaaatgtgacaacatctttatcaccggccctactggctcagtcaagattggagacctcggtctggcaaccctgaagcgggcttcttttgccaagagtgtgataggtaccccagagttcatggcccctgagatgtatgaggagaaatatgatgaatccgttgacgtttatgcttttgggatgtgcatgcttgagatggctacatctgaatatccttactcggagtgccaaaatgctgcgcagatctaccgtcgcgtgaccagtggggtgaagccagccagttttgacaaagtagcaattcctgaagtgaaggaaattattgaaggatgcatacgacaaaacaaagatgaaagatattccatcaaagaccttttgaaccatgccttcttccaagaggaaacaggagtacgggtagaattagcagaagaagatgatggagaaaaaatagccataaaattatggctacgtattgaagatattaagaaattaaagggaaaatacaaagataatgaagctattgagttttgttttgatttagagagagatgtcccagaagatgttgcacaagaaatggtagagtctgggtatgtctgtgaaggtgatcacaagaccatggctaaagctatcaaagacagagtatcattaattaagaggaaacgagagcagcggcagttggtacgggaggagcaagaaaacaaaaagcaggaagagagcagtctcaaacagcaggtagaacaatccagtgcttcccagacaggaatcaagcagctcccttctgctagcaccggcatacctactgcttctaccacttcagcttcagtttctacacaagtagaacctgaagaacctgaggcagatcaacatcaacaactacagtaccagcaacccagtatatctgtgttatctgatgggacggttgacagtggtcagggatcctctgtcttcacagaatctcgagtgagcagccaacagacagtttcatatgggttcccaanncatgaacaggcacattctacaggcacagtcccagggcatataccttctactgtccaagcacagtctcagccccatggggtatatccaccctcaagtgtgcagcagggaatacagcagacagcccctcctcaacagacagtgcagtattcactttcacagacatcaacctccagtgaggccactactgcacagccagtgagtcagcctcaagctccacaagtcttgcctcaagtatcagctggaaaacagagtactcagggagtctctcaggttgctcctgcagagccagttgcagtagcacagccccaagctacccagccgaccactttggcttcctctgtagacagtgcacattcagatgttgcttcaggtatgagtgatggcaatgagaacgtcccatcttccagtggaaggcatgaaggaagaactacaaaacggcattaccgaaaatctgtaaggagtcgctctcgacatgaaaaaacttcacgcccaaaattaagaattttgaatgtttcaaataaaggagaccgagtagtagaatgtcaattagagactcataataggaaaatggttacattcaaatttgacctagatggtgacaaccccgaggagatagcaacaattatggtgaacaatgactttattctagcaatagagagagagtcgtttgtggatcaagtgcgagaaattattgaaaaagctgatgaaatgctcagtgaggatgtcagtgtggaaccagagggtgatcagggattggagagtctacaaggaaaggatgactatggcttttcaggttctcagaaattggaaggagagttcaaacaaccaattcctgcgtcttccatgccacagcaaataggcattcctaccagttctttaactcaagttgttcattctgcgggaaggcggtttatagtgagtcctgtgccagaaagccgattacgagaatcaaaagttttccccagtgaaataacagatacagttgctgcctctacagctcagagccctggaatgaacttgtctcactctgcatcatcccttagtctacaacaggccttttctgaacttagacgtgcccaaatgacagaaggacccaatacagcacctccaaactttagtcatacaggaccaacatttccagtagtacctcctttcttaagtagcattgctggagtcccaaccacagcagcagccacagcaccagtccctgcaacaagcagccctcctaatgacatttccacatcagtaattcagtctgaggttacagtgcccactgaagaggggattgctggagttgccaccagcacaggtgtggtaacttcaggtggtctccccataccacctgtgtctgaatcaccagtactttccagcgtagtttcaagtatcacaatacctgcagttgtctcaatatctactacatccccgtcacttcaagtccccacatccacatctgagatcgttgtttctagtacagcactgtatccttcagtaacagtttcagcaacttcagcctctgcagggggcagtactgctaccccaggtcctaagcctccagctgtagtatctcagcaggcagcaggcagcactactgtgggagccacattaacatcagtttctaccaccacttcattcccaagcacagcttcacagctgtccattcagcttagcagcagtacttctactcctactttagctgaaaccgtggtagttagcgcacactcactagataagacatctcatagcagtacaactggattggctttctccctctctgcaccatcttcctcttcctctcctggagcaggagtgtctagttatatttctcagcctggtgggctgcatcctttggtcattccatcagtgatagcttctactcctattcttccccaagcagcaggacctacttctacacctttattaccccaagtacctagtatcccacccttggtacagcctgttgccaatgtgcctgctgtacagcagacactaattcatagtcagcctcaaccagctttgcttcccaaccagccccatactcattgtcctgaagtagattctgatacacaacccaaagctcctggaattgatgacataaagactctagaagaaaagctgcggtctctgttcagtgaacacagctcatctggagctcagcatgcctctgtctcactggagacctcactagtcatagagagcactgtcacaccaggcatcccaactactgctgttgcaccaagcaaactcctgacttctaccacaagtacttgcttaccaccaaccaatttaccactaggaacagttgctttgccagttacaccagtggtcacacctgggcaagtttctaccccagtcagcactactacatcaggagtgaaacctggaactgctccctccaagccacctctaactaaggctccggtgctgccagtgggtactgaacttccagcaggtactctacccagcgagcagctgccaccttttccaggaccttctctaacccagtcccagcaacctctagaggatcttgatgctcaattgagaagaacacttagtccagagatgatcacagtgacttctgcggttggtcctgtgtccatggcggctccaacagcaatcacagaagcaggaacacagcctcagaagggtgtttctcaagtcaaagaaggccctgtcctagcaactagttcaggagctggtgtttttaagatgggacgatttcaggtttctgttgcagcagacggtgcccagaaagagggtaaaaataagtcagaagatgcaaagtctgttcattttgaatccagcacctcagagtcctcagtgctatcaagtagtagtccagagagtaccttggtgaaaccagagccgaatggcataaccatccctggtatctcttcagatgtgccagagagtgcccacaaaactactgcctcagaggcaaagtcagacactgggcagcctaccaaggttggacgttttcaggtgacaactacagcaaacaaagtgggtcgtttctctgtatcaaaaactgaggacaagatcactgacacaaagaaagaaggaccagtggcatctcctccttttatggatttggaacaagctgttcttcctgctgtgataccaaagaaagagaagcctgaactgtcagagccttcacatctaaatgggccgtcttctgacccggaggccgcttttttaagtagggatgtggatgatggttccggtagtccacactcgccccatcagctgagctcaaagagccttcctagccagaatctaagtcaaagccttagtaattcatttaactcctcttacatgagtagcgacaatgagtcagatatcgaagatgaagacttaaagttagagctgcgacgactacgagataaacatctcaaagagattcaggacctgcagagtcgccagaagcatgaaattgaatctttgtataccaaactgggcaaggtgccccctgctgttattattcccccagctgctcccctttcagggagaagacgacgacccactaaaagcaaaggcagcaaatctagtcgaagcagttccttggggaataaaagcccccagctttcaggtaacctgtctggtcagagtgcagcttcagtcttgcacccccagcagaccctccaccctcctggcaacatcccagagtccgggcagaatcagctgttacagccccttaagccatctccctccagtgacaacctctattcagccttcaccagtgatggtgccatttcagtaccaagcctttctgctccaggtcaaggtaataaagcaaccatcatcgtccaaaaacaataaaatggagatgttgccatacctgggacaaaagcctgttaaggcgggttgggagactagctgaccagaacacagcctgtgtgttgtacactgaagaatctgggtgaaaagggaagtggagtgataatgagaatcggtgggctcactgctcccattaggtgaaattactttttttcaaggaattacagtgaaaagttacatctgtgtggcctatatgacttgctcatttgggatttggaacttaggctttaatattaggctgagatttcctggatgaaattctaaggtgttttagcagtttctgaagctaatacattttcttagccattgtagaattttgttacttttaagtatgggagtggcatactaaaatgaataaccttacaattcagttttttatccataatctactttccaaatatagctctgtttattagtgattgctgaaaaaattcccacagaggaaagagcttttagtcatattagaacaagaattgaaaagacttgggcatctgggtgagaagaatgaaaaaaatataggtactggcttatgtgcctttgccacagtttcacagaaattagagatcagtctcttcacaggaagaatgcacttgattggtaaggagggcaaactagctagcattattcgaactaagaaaagcttccgcattttgcagatgggtagaattaagacctaatatttcatctcttacatatctgaccttccccccagaagcttgttcttctgtgtgccatcttagtgcatttcaccactccagcctcaagtttctaacatcttgtagttgtgttctgtctcttctcctctctctgttctaccctgtttttcccctctcacaggctgtgcgaagtttaactgtgcatctgaacaggtgacattcaaacctggtggcaggaggacccgatttctgagtacgccctgcttggctctttgtgtgtaacacctttactccttccttgtccttgtgtttctgctgcttggatctgatgtttcacgcagtccattttcatttgtctctttttgtatatcatctactcagtggcttggctgaattactgttaccctcagaagtttgggcccccacattaattatgataaaaaatgtcaaaataacaagttatctacaaatttcaatgtaactttctggtagaagtgcttcttcatggatctgtgacagagagtggatatggtatctaggcaatagattgctgggtcatttagaataatgaagactgaactccacagtcgtagtcagtgctgtctgtctgccctagcattagaaatgagagaaatcagccagacacggtggcgtacacctgtaatcccagcactttgggaggccgaggcgggaagattgcttgaggccaggagctcgagaccaaccctgggcaacatggtgataccccatctct

SEQ ID NO: 64 - DNA, 2163 bp, Homo sapiens
gcggagcgcagctgtgagggagtcgctgtgatccggggccccggaacccgagctggagctgaagcgcaggctgcggggcgcggagtcgggaggcctgagtgttccttccagcatgtcggagggggagtcccagacagtacttagcagtggctcagacccaaaggtagaatcctcatcttcagctcctggcctgacatcagtgtcacctcctgtgacctccacaacctcagctgcttccccagaggaagaagaagaaagtgaagatgagtctgagattttggaagagtcgccctgtgggcgctggcagaagaggcgagaagaggtgaatcaacggaatgtaccaggtattgacagtgcatacctggccatggatacagaggaaggtgtagaggttgtgtggaatgaggtacagttctctgaacgcaagaactacaagctgcaggaggaaaaggttcgtgctgtgtttgataatctgattcaattggagcatcttaacattgttaagtttcacaaatattgggctgacattaaagagaacaaggccagggtcatttttatcacagaatacatgtcatctgggagtctgaagcaatttctgaagaagaccaaaaagaaccacaagacgatgaatgaaaaggcatggaagcgttggtgcacacaaatcctctctgccctaagctacctgcactcctgtgacccccccatcatccatgggaacctgacctgtgacaccatcttcatccagcacaacggactcatcaagattggctctgtggctcctgacactatcaacaatcatgtgaagacttgtcgagaagagcagaagaatctacacttctttgcaccagagtatggagaagtcactaatgtgacaacagcagtggacatctactcctttggcatgtgtgcactggagatggcagtgctggagattcagggcaatggagagtcctcatatgtgccacaggaagccatcagcagtgccatccagcttctagaagacccattacagagggagttcattcaaaagtgcctgcagtctgagcctgctcgcagaccaacagccagagaacttctgttccacccagcattgtttgaagtgccctcgctcaaactccttgcggcccactgcattgtgggacaccaacacatgatcccagagaacgctctagaggagatcaccaaaaacatggatactagtgccgtactggctgaaatccctgcaggaccaggaagagaaccagttcagactttgtactctcagtcaccagctctggaattagataaattccttgaagatgtcaggaatgggatctatcctctgacagcctttgggctgcctcggccccagcagccacagcaggaggaggtgacatcacctgtcgtgcccccctctgtcaagactccgacacctgaaccagctgaggtggagactcgcaaggtggtgctgatgcagtgcaacattgagtcggtggaggagggagtcaaacaccacctgacacttctgctgaagttggaggacaaactgaaccggcacctgagctgtgacctgatgccaaatgagaatatccccgagttggcggctgagctggtgcagctgggcttcattagtgaggctgaccagagccggttgacttctctgctagaagagaccttgaacaagttcaattttgccaggaacagtaccctcaactcagccgctgtcaccgtctcctcttagagctcactcgggccaggccctgatctgcgctgtggctgtccctggacgtgctgcagccctcctgtcccttccccccagtcagtattaccctgtgaagccccttccctcctttattattcaggagggctgggggggctccctggttctgagcatcatcctttcccctcccctctcttcctcccctctgcactttgtttacttgttttgcacagacgtgggcctgggccttctcagcagccgccttctagttgggggctagtcgctgatctgccggctcccgcccagcctgtgtggaaaggaggcccacgggcactaggggagccgaattctacaatcccgctggggcggccggggcgggagagaaaggtggtgctgcagtggtggccctggggggccattcgattcgcctcagttgctgctgtaataaaagtctactttttgct

SEQ ID NO: 65 - DNA, 1568 bp, Murine sp.
cttaagcagtttctgaagaagaccaaaaagaaccacaagactatgaatgaaaaggcttggaaacgctggtgtacacagatcctctctgccctaagctacctgcactcctgtgaccctcccatcatccatgggaacctgacctgtgacaccatcttcatccagcacaacggactcatcaagattggctctgtggctcctgacactatcaacaatcacgtgaagacttgccgggaagaacagaagaacctacacttttttgcaccagagtatggagaagtcacaaacgtgacaacagcagtggacatctactcctttggcatgtgtgcactggagatggcagtgctggagattcagggcaatggcgagtcctcatatgtgccacaggaagccatcagcagtgccatccagctactagaagactcattacagagggagtttattcaaaagtgcctgcagtctgagcctgctcggagaccaacagccagagaacttctgttccacccagcactgtttgaagtgccctcactcaagcttcttgctgctcactgtatcgtggggcaccaacacatgatcccagagaacgctctagaggagatcaccaagaacatggataccagtgctgtactagctgaaattcccgcagggccaggacgagaaccagttcagactttgtactctcagtcaccagccctagaattagacaaattccttgaagatgtcaggaatgggatctaccctctgacagcctttgggctacctcggcctcagcagccacagcaggaggaggtgacatcacctgttgtgcccccctctgtcaagactccaactcctgagccagctgaagtggagacacgaaaggtggtgctgatgcagtgcaacatcgaatctgtggaggagggagtcaaacaccatctaacacttctgctgaagctggaggacaaattgaaccggcacctgagctgtgacctgatgccaaatgagagcatcccggacttggcagctgagctggtgcagctgggcttcattagtgaggctgatcagagccgcctgacttctctgctggaggagacgctcaacaagttcaacttcaccaggaacagtacactcaacacagccactgtcaccgtctcctcgtagagctcacttgagccaggcccctagccaggctgtggctgtccctgggcatgctgcagtcctcctgtcccttctccccagtcagtattacccttcgcgcccatattatttaggagggctttaggggctccctggttgagtatcaccctgccccttcccctctcttcctcccctctgcactttgtttacttgttttgcacagacgtgggcctgggccttctcagcagccaccttctagctgggggctagtagctgacctgctgcctcctgccctacttgtgtggacaggaggcccacgggcactggggaagctgagttctacaatcccgctggggcgcatgggcaggagagaaaggtggtgctgcaggggtggccccccggggggggcattcgaatcacctcagttgctgctgtaataaagtctactttttgct

SEQ ID NO: 66 - DNA, 1767 bp, Homo sapiens
atgtcatcatgtgtctctagccagcccagcagcaaccgggccgccccccaggatgagctggggggcaggggcagcagcagcagcgaaagccagaagccctgtgaggccctgcggggcctctcatccttgagcatccacctgggcatggagtccttcattgtggtcaccgagtgtgagccgggctgtgctgtggacctcggcttggcgcgggaccggcccctggaggccgatggccaagaggtcccccttgacacctccgggtcccaggcccggccccacctctccggtcgcaagctgtctctgcaagagcggtcccagggtgggctggcagccggtggcagcctggacatgaacggacgctgcatctgcccgtccctgccctactcacccgtcagctccccgcagtcctcgcctcggctgccccggcggccgacagtggagtctcaccacgtctccatcacgggtatgcaggactgtgtgcagctgaatcagtataccctgaaggatgaaattggaaagggctcctatggtgtcgtcaagttggcctacaatgaaaatgacaatacctactatgcaatgaaggtgctgtccaaaaagaagctgatccggcaggccgcttttccacgtcgccctccaccccgaggcacccggccagctcctggaggctgcatccagcccaggggccccattgagcaggtgtaccaggaaattgccatcctcaagaagctggaccaccccaatgtggtgaagctggtggaggtcctggatgaccccaatgaggaccatctgtacatggtgttcgaactggtcaaccaagggcccgtgatggaagtgcccaccctcaaaccactctctgaagaccaggcccgtttctacttccaggatctgatcaaaggcatcgagtacttacactaccagaagatcatccaccgtgacatcaaaccttccaacctcctggtcggagaagatgggcacatcaagatcgctgactttggtgtgagcaatgaattcaagggcagtgacgcgctcctctccaactacgtgggcacgcccgccttcatggctcccgagtcgctctctgagacccgcaagatcttctctgggaaggccaaggatgtttgggccatgggtgtgacactatactgctttgtctttggccagtgcccattcatggacgagcggatcatgtgtttacacagtaagatcaagagtcaggccctggaatttccagaccagcccgacatagctgaggacttgaaggacctgatcacccgtatgctggacaagaaccccgagtcgaggatcgtggtgccggaaatcaagctgcacccctgggtcacgaggcatggggcggagccgttgccgtcggaggatgagaactgcacgctggtcgaagtgactgaagaggaggtcgagaactcagtcaaacacattcccagcttggcaaccgtgatcctggtgaagaccatgatacgtaaacgctcctttgggaacccattcgagggcagccggcgggaggaacgctcactgtcagcgcctggaaacttgctcaccaaaaaaccaaccagggaatgtgagtccctgtctgagctcaaggaagcaaggcagcgaagacaacctccagggcaccgacccgccccccgtgggggaggaggaagtgctcttgtgagaggcagtccctgcgtggaaagttgctgggcccccgcccccggctcccccgcacgcatgcatccactgcggccggaggaggccatggagcccgagtag

SEQ ID NO: 67 - DNA, 3387 bp, Homo sapiens
ccgggatgtgagcctggtggttggcagctggagccacgtcggagggggaagtgtcgcagcattctctgcaggcatcacagacctgaggcagtggcctccggagggcactggacagaaacagccatccaagtggctgagtggagggaccctgctcaagtgcagctgcagtggccggggtttccctcaggtagggatcggggcgccttgtcgccgccagccacgtgtggcgtccggtacagtcagcagagtgcagggtgcgggcaccaggaaagggggcgcaggggaactcccgcgggcctcgcgtttgcaaacttctcgcctgggcaggaggcggtcgtgggaaagaaggtggaagagcgagctttttggaactgtgcacgggacagattggacgcacacccctcgggaggcgcgaaggcatggaaaatttgaagcatattatcacccttggccaggtcatccacaaacggtgtgaagagatgaaatactgcaagaaacagtgccggcgcctgggccaccgcgtcctcggcctgatcaagcctctggagatgctccaggaccaaggaaagaggagcgtgccctctgagaagttaaccacagccatgaaccgcttcaaggctgccctggaggaggctaatggggagatagaaaagttcagcaatagatccaatatctgcaggtttctaacagcaagccaggacaaaatactcttcaaggacgtgaacaggaagctgagtgatgtctggaaggagctctcgctgttacttcaggttgagcaacgcatgcctgtttcacccataagccaaggagcgtcctgggcacaggaagatcagcaggatgcagacgaagacaggcgagctttccagatgctaagaagagataatgaaaaaatagaagcttcactgagacgattagaaatcaacatgaaagaaatcaaggaaactttgaggcagtgtaagttatcatgtgccctgctgtttctgatggcccccaaactagaagtcatcagtttactgggaccccagcctcccgctacccctgcatttgtccattttctgtgctggatggctggaagcagcccacaggtttggggatccattcatggctagcccaggcttctgtccatggaataacatgtggagagagcttcttgaccagtaagataccttctagcagctgtcaaagtacttaaaaacctctatgaatagaatcaaagcttcagttcagttgctgaatttccaagaagaaattcaaatcaaatttaaaatgcccactcattcattcattcaacaaaactgtgagtatctggtttatgccagaggccatgcaaagaggtaactaagatgcagagaaggacactgccttccaggagctcacggggtggaggaggaaagaggaaagacagacagtgaacacacaacagcaaggttactgagcttgaactatgtccctaactactagatctgaaatgactacgccagatgccagatgctcaagtgccaagctctgggtaacaggaatagacatccttccaggatgagagagatgagtctggatgagggttaaggctggagggacaggcgggatttgaagaggagggaaaggaagtggatgacacattctgttaactgtccagctgtgtctctactggtcactcagaggcacgggagccgctcccttgggctgagtccatcagaagccccagccaccaccagctctggttcatgtagtagagcttcccactcacacatcacaaatatgccacctcccttaggaccccttcctctgctcattgactcttttgtcttctttcctctcgggggtgaggtcagatttaccaccaaaatgcatgcaggagatcccgcaagagcaaatcaaggagatcaagaaggagcagctttcaggatccccgtggattctgctaagggaaaatgaagtcagcacactttataaaggagaataccacagagctccagtggccataaaagtattcaaaaaactccaggctggcagcattgcaatagtgaggcagactttcaataaggagatcaaaaccatgaagaaattcgaatctcccaacatcctgcgtatatttgggatttgcattgatgaaacagtgactccgcctcaattctccattgtcatggagtactgtgaactcgggaccctgagggagctgttggatagggaaaaagacctcacacttggcaagcgcatggtcctagtcctgggggcagcccgaggcctataccggctacaccattcagaagcacctgaactccacggaaaaatcagaagctcaaacttcctggtaactcaaggctaccaagtgaagcttgcaggatttgagttgaggaaaacacagacttccatgagtttgggaactacgagagaaaagacagacagagtcaaatctacagcatatctctcacctcaggaactggaagatgtattttatcaatatgatgtaaagtctgaaatatacagctttggaatcgtcctctgggaaatcgccactggagatatcccgtttcaaggtgaagaatgtgaagactggctcagccagtggctgtaattctgagaagatccgcaagctggtggctgtgaagcggcagcaggagccactgggtgaagactgcccttcagagctgcgggagatcattgatgagtgccgggcccatgatccctctgtgcggccctctgtggatgaaatcttaaagaaactctccaccttttctaagtagtgtatcaaaatctaaaccaaggagtctctggacaagaagctgggagaggcacgaactggacatctctctctctcatatccttcggcattgggttatctatgggtgcaaggagtgggcacgcttctctgttacaaatagaaaacgattccagtcatacaggacacatcccactccaaatgatatttccaaaaacatacctctgacagtaactttgatagatggtttgtcaaatgtatctttctgggtatccacacctcttggcaatgaaatttgcagctcctcccttccataaatgaagtctctttccccaccatttgaatctgggctggcactgtgacttgatttgatcaatagaatgtggaagaagtgactgtatgccagttccaagcctaggtttcaagaggccttataaatgtctgttggaaccttacccagccatggacatgttgagtgagcatgctggagaatgagagaccacatgaagcagaaacatgctttcctagctgaagtcatactagcccaaccaacatggcagctaacacatgaatgaggccaatcaagaccagaagaaccactcaagcagatcccagcccaaattgcccattcacacaatcaggagctaaataaattactgttgtctttt

SEQ ID NO: 68 - DNA, 3993 bp, Homo sapiens
cgcccggccccctcccccggcgccggccacgggaggcggtgatgcgggcgcgggcggcctcggctgcgccgagagcggagacacaggctcaagatggcagattccgactgaggctgggggggccgagctcgcgcgccgctttcccgtccccgttgccatgaaccgcggacaccccggccccgatggcccccgtgtacgaaggtatggcctcacatgtgcaagttttctcccctcacacccttcaatcaagtgccttctgtagtgtgaagaaactgaaaatagagccgagttccaactgggacatgactgggtacggctcccacagcaaagtgtatagccagagcaagaacatccccctgtcgcagccagccaccacaaccgtcagcacctccttgccggtcccaaacccaagcctaccttacgagcagaccatcgtcttcccaggaagcaccgggcacatcgtggtcacctcagcaagcagcacttctgtcaccgggcaagtcctcggcggaccacacaacctaatgcgtcgaagcactgtgagcctccttgatacctaccaaaaatgtggactcaagcgtaagagcgaggagatcgagaacacaagcagcgtgcagatcatcgaggagcatccacccatgattcagaataatgcaagcggggccactgtcgccactgccaccacgtctactgccacctccaaaaacagcggctccaacagcgagggcgactatcagctggtgcagcatgaggtactgtgctccatgaccaacacctacgaggtcttagagttcttgggccgagggacgtttgggcaagtggtcaagtgctggaaacggggcaccaatgagatcgtagccatcaagatcctgaagaaccacccatcctatgcccgacaaggtcagattgaagtgagcatcctggcccggttgagcacggagagtgccgatgactataacttcgtccgggcctacgaatgcttccagcacaagaaccacacgtgcttggtcttcgagatgttggagcagaacctctatgactttctgaagcaaaacaagtttagccccttgcccctcaaatacattcgcccagttctccagcaggtagccacagccctgatgaaactcaaaagcctaggtcttatccacgctgacctcaaaccagagaacatcatgctggtggatccatctagacaaccatacagagtcaaggtcatcgactttggttcagccagccacgtctccaaggctgtgtgctccacctacttgcagtccagatattacagggcccctgagatcatccttggtttaccattttgtgaggcaattgacatgtggtccctgggctgtgttattgcagaattgttcctgggttggccgttatatccaggagattcggagtatgatcagattcggtatatttcacaaacacagggtttgcctgctgaatatttattaagcgccgggacaaagacaactaggtttttcaaccgtgacacggactcaccatatcctttgtggagactgaagacaccagatgaccatgaagcagagacagggattaagtcaaaagaagcaagaaagtacattttcaactgtttagatgatatggcccaggtgaacatgacgacagatttggaagggagcgacatgttggtagaaaaggctgaccggcgggagttcattgacctgttgaagaagatgctgaccattgatgctgacaagagaatcactccaatcgaaaccctgaaccatccctttgtcaccatgacacacttactcgattttccccacagcacacacgtcaaatcatgtttccagaacatggagatctgcaagcgtcgggtgaatatgtatgacacggtgaaccagagcaaaacccctttcatcacgcacgtggcccccagcacgtccaccaacctgaccatgacctttaacaaccagctgaccactgtccacaaccagccctcagcggcatccatggctgcagtggcccagcggagcatgcccctgcagacaggaacagcccagatttgtgcccggcctgacccgttccagcaagctctcatcgtgtgtccccccggcttccaaggcttgcaggcctctccctctaagcacgctggctactcggtgcgaatggaaaatgcagttcccatcgtcactcaagccccaggagctcagcctcttcagatccaaccaggtctgcttgcccagcaggcttggccaagtgggacccagcagatcctgcttcccccagcatggcagcaactgactggagtggccacccacacctcagtgcagcatgccaccgtgattcccgagaccatggcaggcacccagcagctggcggactggagaaatacgcatgctcacggaagccattataatcccatcatgcagcagcctgcactattgaccggtcatgtgacccttccagcagcacagcccttaaatgtgggtgtggcccacgtgatgcggcagcagccaaccagcaccacctcctcccggaagagtaagcagcaccagtcatctgtgagaaatgtctccacctgtgaggtgtcctcctctcaggccatcagctccccacagcgatccaagcgtgtcaaggagaacacacctccccgctgtgccatggtgcacagtagcccggcctgcagcacctcggtcacctgtgggtggggcgacgtggcctccagcaccacccgggaacggcagcggcagacaattgtcattcccgacactcccagccccacggtcagcgtcatcaccatcagcagtgacacggacgaggaggaggaacagaaacacgcccccaccagcactgtctccaagcaaagaaaaaacgtcatcagctgtgtcacagtccacgactccccctactccgactcctccagcaacaccagcccctactccgtgcagcagcgtgctgggcacaacaatgccaatgcctttgacaccaaggggagcctggagaatcactgcacggggaacccccgaaccatcatcgtgccacccctgaaaacccaggccagcgaagtattggtggagtgtgatagcctggtgccagtcaacaccagtcaccactcgtcctcctacaagtccaagtcctccagcaacgtgacctccaccagcggtcactcttcagggagctcatctggagccatcacctaccggcagcagcggccgggcccccacttccagcagcagcagccactcaatctcagccaggctcagcagcacatcaccacggaccgcactgggagccaccgaaggcagcaggcctacatcactcccaccatggcccaggctccgtactccttcccgcacaacagccccagccacggcactgtgcacccgcatctggctgcagccgctgccgctgcccacctccccacccagccccacctctacacctacactgcgccggcggccctgggctccaccggcaccgtggcccacctggtggcctcgcaaggctctgcgcgccacaccgtgcagcacactgcctacccagccagcatcgtccaccaggtccccgtgagcatgggcccccgggtcctgccctcgcccaccatccacccgagtcagtatccagcccaatttgcccaccagacctacatcagcgcctcgccagcctccaccgtctacactggatacccactgagccccgccaaggtcaaccagtacccttacatataaacactggaggggagggagggagggagggagggagagaatggcccgagggaggagggagagaaggagggaggcgctcctgggaccgtgggcgctggccttttatactgaagatgccgcacacaaacaatgcaaacggggcaggggcgggggggggggggcagagggcagggggacgggtcgggacaccagtgaaacttgaaccgggaagtgggaggacgtagagcagagaagagaacatttttaaaaggaagggattaaagagggtgggaaatctatggtttttattttaaaaaag

SEQ ID NO: 69 - DNA, 2141 bp, Homo sapiens
cgggagcgaaagtgcgctgagctgcagtgtctggtcgagagtacccgtgggagcgtcgcgccgcggaggcagccgtcccggcgtaggtggcgtggccgaccggacccccaactggcgcctctccccgagcggggtcccgagctaggagatgggaggcacagctcgtgggcctgggcggaaggatgcggggccgcctggggccgggctcccgccccagcagcggagttgggggatggtgtctatgacaccttcatgatgatagatgaaaccaaatgtcccccctgttcaaatgtactctgcaatccttctgaaccacctccacccagaagactaaatatgaccgctgagcagtttacaggagatcatactcagcactttttggatggaggtgagatgaaggtagaacagctgtttcaagaatttggcaacagaaaatccaatactattcagtcagatggcatcagtgactctgaaaaatgctctcctactgtttctcagggtaaaagttcagattgcttgaatacagtaaaatccaacagttcatccaaggcacccaaagtggtgcctctgactccagaacaagccctgaagcaatataaacaccacctcactgcctatgagaaactggaaataattaattatccagaaatttactttgtaggtccaaatgccaagaaaagacatggagttattggtggtcccaataatggagggtatgatgatgcagatggggcctatattcatgtacctcgagaccatctagcttatcgatatgaggtgctgaaaattattggcaaggggagttttgggcaggtggccagggtctatgatcacaaacttcgacagtacgtggccctaaaaatggtgcgcaatgagaagcgctttcatcgtcaagcagctgaggagatccggattttggagcatcttaagaaacaggataaaactggtagtatgaacgttatccacatgctggaaagtttcacattccggaaccatgtttgcatggcctttgaattgctgagcatagacctttatgagctgattaaaaaaaataagtttcagggttttagcgtccagttggtacgcaagtttgcccagtccatcttgcaatctttggatgccctccacaaaaataagattattcactgcgatctgaagccagaaaacattctcctgaaacaccacgggcgcagttcaaccaaggtcattgactttgggtccagctgtttcgagtaccagaagctctacacatatatccagtctcggttctacagagctccagaaatcatcttaggaagccgctacagcacaccaattgacatatggagttttcgctgcatccttgcagaacttttaacaggacagcctctcttccctggagaggatgaaggagaccagttggcctgcatgatggagcttctagggatgccaccaccaaaacttctggagcaatccaaacgtgccaagtactttattaattccaagggcataccccgctactgctctgtgactacccaggcagatgggagggttgtgcttgtggggggtcgctcacgtaggggtaaaaagcggggtcccccaggcagcaaagactgggggacagcactgaaagggtgtgatgactacttgtttatagagttcttgaaaaggtgtcttcactgggacccctctgcccgcttgaccccagctcaagcattaagacacccttggattagcaagtctgtccccagacctctcaccaccatagacaaggtgtcagggaaacgggtagttaatcctgcaagtgctttccagggattgggttctaagctgcctccagttgttggaatagccaataagcttaaagctaacttaatgtcagaaaccaatggtagtatacccctatgcagtgtattgccaaaactgattagctagtggacagagatatgcccagagatgcatatgtgtatatttttatgatcttacaaacctgcaaatggaaaaaatgcaagcccattggtggatgtttttgttagagtagactttttttaaacaagacaaaacatttttatatgattataaaagaattcttcaagggctaattacctaaccagcttgtattggccatctggaatatgcattaaatgactttttataggtca

SEQ ID NO: 70 - DNA, 741 bp, Murine sp.
ccacgcgtccggagttgctaggaatgccaccgcagaaacttctggagcaatccaagcgtgccaagtactttattaactccaaaggcttgcctcgatactgctccgtatctacccagacggacgggagggtggtgcttctcgggggtcgctcacgcaggggtaaaaagcgaggcccgccaggcagcaaagactgggcaaccgcactgaagggctgtggtgactacttgttcatagagtttctgaaacgatgcctccagtgggacccctctgcccgcctcaccccggctcaagcattaagacatccttggattagcaagtctacacccaaacctctcaccatggacaaggtgccagggaagcgggtagttaaccctacaaatgctttccagggactgggttccaagctgcctccagtcgttgggatagccagtaagcttaaagctaacctaatgtccgaaaccagtggtagtatacctctgtgcagtgtattgccaaagctgattagctagtggaccactcagagactgatacatatcatatgtatttttaattaccttgcaaacatgcaaatggaaaacggaataattgaagcccattcactgatggatatgtttttgttagacttttttttaacaaggcagaacatttttatatgactataaaagaacgcttcaagggctaatgtcaaaccagcttgtattggccatctggagtatacattaaatgactttttcataggtc

SEQ ID NO: 71 - DNA, 5163 bp, Homo sapiens
gtcgaggcgcagcgctgccatggctgggggccgtggggcccccgggcgcggccgggacgagcctccggagagctacccgcaacgacaggaccacgagctacaggccctggaggccatctacggcgcggacttccaagacctgcggccggacgcttgcggaccggtcaaagagccccctgaaatcaatttagttttgtaccctcaaggcctaactggtgaagaagtatatgtaaaagtggatttgagggttaaatgcccacctacctatccagatgtagttcctgaaatagagttaaaaaatgccaaaggtctatcaaatgaaagtgtcaatttgttaaaatctcgcctagaagaactggccaagaaacactgtggggaggtgatgatctttgaactggcttaccacgtgcagtcatttctcagcgagcataacaagccccctcccaagtcttttcatgaagaaatgctggaaaggcgggctcaggaggagcagcagaggctgttggaggccaagcggaaagaagagcaggagcaacgtgaaatcctgcatgagattcagagaaggaaagaagagataaaagaagagaaaaaaaggaaagaaatggctaagcaggaacgtttggaaattgctagtttgtcaaaccaagatcatacctctaagaaggacccaggaggacacagaacggctgccattctacatggaggctctcctgactttgtaggaaatggtaaacatcgggcaaactcctcaggaaggtctaggcgagaacgtcagtattctgtatgtaatagtgaagattctcctggctcttgtgaaattctgtatttcaatatggggagtcctgatcagctcatggtgcacaaagggaaatgtattggcagtgatgaacaacttggaaaattagtctacaatgctttggaaacagccactggtggctttgtcttgttgtatgagtgggtccttcagtggcagaaaaaaatgggtccattccttaccagtcaagaaaaagagaagattgataagtgcaaaaagcagattcaaggaacagaaacagaattcaactcactggtaaaattgagccatccaaatgtagtacgctaccttgcaatgaatctcaaagagcaagacgactccatcgtggtggacattttagtggagcacattagtggggtctctcttgctgcacacctgagccactcaggccccatccctgtgcatcagcttcgcaggtacacagctcagctcctgtcaggccttgattatctgcacagcaattctgtggtgcataaggtcctgagtgcatctaatgtcttggtggatgcagaaggcaccgtcaagattacggactatagcatttctaagcgcctcgcagacatttgcaaggaggatgtgtttgagcaaacccgagttcgttttagtgacaatgctctgccttataaaacggggaagaaaggagatgtttggcgtcttggccttctgctgctgtccctcagccaaggacaggaatgtggagagtaccctgtgaccatccctagtgacttaccagctgactttcaagattttctaaagaaatgtgtgtgcttggatgacaaggaaagatggagtccccagcagttgttgaaacacagctttataaatccccagccaaaaatgcctctagtggaacaaagtcctgaagattctggaggacaagattatgttgagactgttattcctagcaaccggctacccagtgctgccttctttagtgagacacagagacagttttcccgatacttcattgagtttgaagaattacaacttcttggtaaaggagcttttggagctgtcatcaaggtgcagaacaagttggacggctgctgctacgcagtgaagcgcatccccatcaacccggccagccggcagttccgcaggatcaagggcgaagtgacactgctgtcacggctgcaccatgagaacattgtgcgctactacaacgcctggatcgagcggcacgagcggccggcgggaccggggacgccgcccccggactccgggcccctggccaaggatgaccgagctgcacgcgggcagccggcgagcgacacagacggcctggacagcgtagaggccgccgcgccgccacccatcctcagcagctcggtggagtggagcacttcgggcgagcgctcggccagtgcccgtttccccgccaccggcccgggctccagcgatgacgaggacgacgacgaggacgagcacggtggcgtcttctcccagtccttcctgcctgcttcagattctgaaagtgatattatctttgacaatgaagatgagaacagtaaaagtcagaatcaggatgaagattgcaatgaaaagaatggctgccatgaaagtgagccatcagtgacgactgaggctgtgcactacctatacatccagatggagtactgtgagaagagcactttacgagacaccattgaccagggactgtatcgagacaccgtcagactctggaggctttttcgagagattctggatggattagcttatatccatgagaaaggaatgattcaccgggatttgaagcctgtcaacatttttttggattctgatgaccatgtgaaaataggtgattttggtttggcgacagaccatctagccttttctgctgacagcaaacaagacgatcagacaggagacttgattaagtcagacccttcaggtcacttaactgggatggttggcactgctctctatgtaagcccagaggtccaaggaagcaccaaatctgcatacaaccagaaagtggatctcttcagcctgggaattatcttctttgagatgtcctatcaccccatggtcacggcttcagaaaggatctttgttctcaaccaactcagagatcccacttcgcctaagtttccagaagactttgacgatggagagcatgcaaagcagaaatcagtcatctcctggctgttgaaccacgatccagcaaaacggcccacagccacagagctgctcaagagtgagctgctgcccccaccccagatggaggagtcagagctgcatgaagtgctgcaccacacgctgaccaacgtggatgggaaggcctaccgcaccatgatggcccagatcttctcgcagcgcatctcccctgccatcgattacacctatgacagcgacatactgaagggcaacttctcaatccgtacagccaagatgcagcagcatgtgtgtgaaaccatcatccgcatctttaaaagacatggagctgttcagttgtgtactccactactgcttccccgaaacagacaaatatatgagcacaacgaagctgccctattcatggaccacagcgggatgctggtgatgcttccttttgacctgcggatcccttttgcaagatatgtggcaagaaataatatattgaatttaaaacgatactgcatagaacgtgtgttcaggccgcgcaagttagatcgatttcatcccaaagaacttctggagtgtgcatttgatattgtcacttctaccaccaacagctttctgcccactgctgaaattatctacactatctatgaaatcatccaagagtttccagcacttcaggaaagaaattacagtatttatttgaaccataccatgttattgaaagcaatactcttacactgtgggatcccagaagataaactcagtcaagtctacattattctgtatgatgctgtgacagagaagctgacgaggagagaagtggaagctaaattttgtaatctgtctttgtcttctaatagtctgtgtcgactctacaagtttattgaacagaagggagatttgcaagatcttatgccaacaataaattcattaataaaacagaaaacaggtattgcacagttggtgaagtatggcttaaaagacctagaggaggttgttggactgttgaagaaactcggcatcaagttacaggtcttgatcaatttgggcttggtttacaaggtgcagcagcacaatggaatcatcttccagtttgtggctttcatcaaacgaaggcaaagggctgtacctgaaatcctcgcagctggaggcagatatgacctgctgattccccagtttagagggccacaagctctggggccagttcccactgccattggggtcagcatagctatagacaagatatctgctgctgtcctcaacatggaggaatctgttacaataagctcttgtgacctcctggttgtaagtgttggtcagatgtctatgtccagggccatcaacctaacccagaaactctggacagcaggcatcacagcagaaatcatgtacgactggtcacagtcccaagaggaattacaagagtactgcagacatcatgaaatcacctatgtggcccttgtctcggataaagaaggaagccatgtcaaggttaagtctttcgagaaggaaaggcagacagagaagcgtgtgctggagactgaacttgtggaccatgtactgcagaaactgaggactaaagtcactgatgaaaggaatggcagagaagcttccgataatcttgcagtgcaaaatctgaaggggtcattttctaatgcttcaggtttgtttgaaatccatggagcaacagtggttcccattgtgagtgtgctagccccggagaagctgtcagccagcactaggaggcgctatgaaactcaggtacaaactcgacttcagacctcccttgccaacttacatcagaaaagcagtgaaattgaaattctggctgtggatctacccaaagaaacaatattacagtttttatcattagagtgggatgctgatgaacaggcatttaacacaactgtgaagcagctgctgtcacgcctgccaaagcaaagatacctcaaattagtctgtgatgaaatttataacatcaaagtagaaaaaaaggtgtctgtgctatttctgtacagctatagagatgactactacagaatcttattttaaccctaaagaactgtcgttaacctcattcaaacagacagaggcttatactggaataatggaatgttgtacattcatcataatttaaaattaaattctaagaagaggctgggtgcagtggctcacacctttaatcccagcactttgggaagccaaggcaggaagactgcttgaaaccaggagtttgagaccagcct

SEQ ID NO: 72 - skipped

SEQ ID NO: 73 - DNA, 1893 bp, Homo sapiens
atgctggggggcaactccggggtccgcaagcgcgaagaggagggcgacggggctggggctgtggctgcgccgccggccatcgactttcccgccgagggcccggaccccgaatatgacgaatctgatgttccagcagaaatccaggtgttaaaagaacccctacaacagccaaccttcccttttgcagttgcaaaccaactcttgctggtttctttgctggagcacttgagccacgtgcatgaaccaaacccacttcgttcaagacaggtgtttaagctactttgccagacgtttatcaaaatggggctgttgtcttctttcacttgtagtgacgagtttagctcattgagactacatcacaacagagctattacacacttaatgaggtctgctaaagagagagttcgtcaggatccttgtgaggatatttctcgtatccagaaaatcagatcaagggaagtagccttggaagcacaaacttcacgttacttaaatgaatttgaagaacttgtcatcttaggaaaaggtggatacggaagagtatacaaggtcaggaataaattagatggtcagtattatgcaataaaaaaaatcctgattaagggtgcaactaaaacagtttgcatgaaggtcctacgggaagtgaaggtgctggcaggtcttcagcaccccaatattgttggctatcacaccgcgtggatagaacatgttcatgtgattcagccacgagcagacagagctgccattgagttgccatctctggaagtgctctccgaccaggaagaggacagagagcaatgtggtgttaaaaatgatgaaagtagcagctcatccattatctttgctgagcccaccccagaaaaagaaaaacgctttggagaatctgacactgaaaatcagaataacaagtcggtgaagtacaccaccaatttagtcataagagaatctggtgaacttgagtcgaccctggagctccaggaaaatggcttggctggtttgtctgccagttcaattgtggaacagcagctgccactcaggcgtaattcccacctagaggagagtttcacatccaccgaagaatcttccgaagaaaatgtcaactttttgggtcagacagaggcacagtaccacctgatgctgcacatccagatgcagctgtgtgagctctcgctgtgggattggatagtcgagagaaacaagcggggccgggagtatgtggacgagtctgcctgtccttatgttatggccaatgttgcaacaaaaatttttcaagaattggtagaaggtgtgttttacatacataacatgggaattgtgcaccgagatctgaagccaagaaatatttttcttcatggccctgatcagcaagtaaaaataggagactttggtctggcctgcacagacatcctacagaagaacacagactggaccaacagaaacgggaagagaacaccaacacatacgtccagagtgggtacttgtctgtacgcttcacccgaacagttggaaggatctgagtatgatgccaagtcagatatgtacagcttgggtgtggtcctgctagagctctttcagccgtttggaacagaaatggagcgagcagaagttctaacaggtttaagaactggtcagttgccggaatccctccgtaaaaggtgtccagtgcaagccaagtatatccagcacttaacgagaaggaactcatcgcagagaccatctgccattcagctgctgcagagtgaacttttccaaaattctggaaatgttaacctcaccctacagatgaagataatagagcaagaaaaagaaattgcagaactaaagaagcagctaaacctcctttctcaagacaaaggggtgagggatgacggaaaggatgggggcgtgggatga

SEQ ID NO: 74 - DNA, 3055 bp, Homo sapiens
cacaagagcccttcctgcagggaacctcaggcttcagagagccgaaaagttgggaggcgtaaccacttacaggccggaagtgtccggggtggacgcattcgggtagccgaagaagtcccaggattgccgaagaagtcccaggatttccgaagcgagccgaagcatcgcgacagttttcagagacagctgatcggttggagctgttgcgccgagcagtcatggcggcggccagagctactacgccggccgatggcgaggagcccgccccggaggctgaggctctggccgcagcccgggagcggagcagccgcttcttgagcggcctggagctggtgaagcagggtgccgaggcgcgcgtgttccgtggccgcttccagggccgcgcggcggtgatcaagcaccgcttccccaagggctaccggcacccggcgctggaggcgcggcttggcagacggcggacggtgcaggaggcccgggcgctcctccgctgtcgccgcgctggaatatctgccccagttgtcttttttgtggactatgcttccaactgcttatatatggaagaaattgaaggctcagtgactgttcgagattatattcagtccactatggagactgaaaaaactccccagggtctctccaacttagccaagacaattgggcaggttttggctcgaatgcacgatgaagacctcattcatggtgatctcaccacctccaacatgctcctgaaaccccccctggaacagctgaacattgtgctcatagactttgggctgagtttcatttcagcacttccagaggataagggagtagacctctatgtcctggagaaggccttcctcagtacccatcccaacactgaaactgtgtttgaagcctttctgaagagctactccacctcctccaaaaaggccaggccagtgctaaaaaaattagatgaagtgcgcctgagaggaagaaagaggtccatggttgggtagaagaatgtgtatgacaaccacacacagtgaagctcttttttcaaagtaaatttgaagaaatgctacaagtatgagatgagatctaagtaaaggtgttaagatatttttaagtggtatgtgatcgtgtcattatcatctgcacttcactcaagagcttactatgtgtctaagtcatgttctaggcagaattgggtatttaaagtaaattgaggacaggcttctcccagattgtgacatgtatatctcagatacatgggtgtggcattgaaccacataatgagaacattattctctttttagtccttgtgagacaaggatgaagtctcagttgctgatactcgctgagcttactggccctctaacccagtgtttttttttgttgttgttgtgtacatgttatatttattttgaaaccagtttaatgggatacaaccagcattttaaaaaatgaaatagaatacagcatggaaaatatcagtgtattgttttatgaaactttcacgtgtatatatagaccaaggatatgtgctgagttttgatgtcaaatatatttctctttcagggtcatgatcaaaaaatgaaaagtctgcttaactccaatttctcttttaaaaaagcagacttacagctttcaggcaactgaaattcatgttaacatgtttttatttttattgctttgtatttttgtggttaccttctaagacaagtgattgatctaaagttccttttaagtttataccgctaaacaaactgagttgatttctatcacaggcagtaagtaggtagagcaaaaatggtgaagtgacttgtgaagactgaagtttgatgaagtctggtttaaggcacaggtaaactgagtgtggatgcaaaagtaccaggagctagcttttaaccttgcccagcctcagtttcttttcttagaagaagctatgtttgggtgggaagggaagagagggataagaaaatacctttcttccttgtaaactccaatcaacaaacatattttgagtgccttttgtgttccttggcaccctgttgggtattgggtacttggcaccctgttgggtattgggtacaatggtgagccagacagacacagcgcctgtccttttgtaagaatatttatttttataaaaaagtataaagtatacagtgggatgttttgatatacattatgaaatgattgctacagctgagctaattaacacccatcacctcacatagttactgtcttgtttcttaatatggacatttgcagctatgaatttccctctgcacactgttgtcatcacacactctcagttttggtattttgtgtttttgttttcattcatctcaaagtattttctaatttcccttgtgatttcttctttgaccccttgattgtttagaaatctgttaatttccacacatttgtaaatgttccaatttttcttttgttattgccagcttcattccattgtgttcagagatgatacagtcagtgcctgttcttatgaagcaaacattctataatagtaggaccagtaccctgtctgtttcattcaccacagtcagcatgccccaagtgcccagcatggggcggatggccaggaatgagtgaaaacttcccttcctgggtagttgtgactagtagagaggaaaaataatataattgcctgcttactgcatgccaggcattgggctgggaatttttatattggatctaaaataactcttaagttaggcattatccccattttatagatggagaaactggccccaaaaggtgggaacttgtccaagacgtcacaggtagcaagaggtacttttacctggctccaaatctgtgttctttccactgacaaatgagatatgggatatggtgcatctttacagtactataataagtattggcgtataacattattttcaaggaactccaagggccacaggagctgacaggtttttcaattaatattcccaacatgaatgagatgcctcattcctcagtttcctcacgtgtactataaggctagtacctgctttgttggggtatggttggctcgtgtgcattaagtcaacaaatccctagt

SEQ ID NO: 75 - DNA, 926 bp, Murine sp.
ctggtgcagcagggcgccgaggcgcgcgttttccgtggccgcttccagggccgcgcggccgtggtgaagcaccgcttcccgaagagttaccggcacccggagctggaggcgcggctcggccgtcggcggacggtgcaggaggcgcgcgcgctgctccgctgccgccgtgcggggatagctgccccagtcgtcttctttgtggactatgcgtctaactgcttatatatggaagaaatcgaagactcggtgactgttcgggattatatccaatccactatggagactgaaaaggacccccagtgcctcttggacctggccaggaggatggggcaggttctggccggaatgcacgaccaagacctcattcacggggacctcaccacctccaacatgctcctgaggcggcccctggcgcagctgcacatcgtgctcatcgactttgggctgagctttgtctcaggactgccggaagataaaggcgtcgacctctatgtcctggagaaggccttcctcagcacgcacccccacaccgagaccgcgtttgaagcctttctgaagagttacggggcctcgtccaagaagtccagtccagtgctgaagaagttagatgaggtgcgcctgagagggcgaaagcggtccatggtcgggtagtggagctgtggtgaactggctcacggtgaaggatgatgtagacgaggctggacccctcagcaaagcatgggttgttaagtggtctgtgatcgtgctgggccaccaccatccatggctcactgttctcaggggcttcatgtacatgaggtttattctgggcagaactgggtaggtagcccaggctagccttgaatttatggcaacatcctacctcagcttgcttggaagaggttataagccaccatacctgactttgcactgattctgtcagaaac

SEQ ID NO: 76 - DNA, 1791 bp, Homo sapiens
atggcggggaactgtggggcccgcggcgcgctgtcggcgcacacgctgctgttcgacctgccgcccgcgctgctcggagagctctgcgctgttctggacagctgcgacggcgcgctgggctggcgcggcctggcagagagactttcaagcagctggctggatgttcgtcatattgaaaagtatgtagaccaaggtaaaagtggaacaagagaattactttggtcctgggcacagaaaaacaagaccatcggtgaccttttacaggtcctccaggagatgggacatcgtcgagctattcatttaattacaaactatggagcagtgttgagtccttcagagaagagttatcaggaaggtggatttccaaatatattattcaaggaaacagccaatgtcaccgtggataatgttcttattcctgaacataatgaaaaaggagtactgcttaaatcttccatcagctttcaaaatatcatagaaggaactagaaatttccacaaagacttcctaattggagaaggagagatttttgaggtatacagagtggagattcaaaacctaacatatgctgtcaaattatttaaacaggagaaaaaaatgcagtgtaagaagcattggaagaggtttttatctgagcttgaagttttactactgtttcatcacccaaacatactagagttggctgcatattttacagagactgagaagttctgtctgatttatccatacatgagaaatggaacactttttgacagattgcagtgtgtaggtgacacggccccactcccttggcacattcgaatcggtatattaataggaatatccaaagccattcactacctgcacaacgttcaaccatgctcggtcatctgtggcagtatatcaagtgcaaacatccttttggatgatcagtttcaacccaaactaactgattttgccatggcacacttccggtcccacctagaacatcagagttgtaccataaatatgaccagcagcagcagtaaacatctgtggtacatgccagaagagtacatcagacaggggaaactttccattaaaacagatgtctacagctttggaattgtaataatggaagttctaacaggatgtagagtagtgttagatgatccaaaacatatccagctgcgggatctccttagagaattgatggagaagagaggcctggattcatgtctctcatttctagataagaaagtgcctccctgccctcggaatttctctgccaagctcttctgtttggcaggccggtgtgctgcaacgcgggcaaagttaagaccatcaatggatgaagttttaaatactcttgaaagtactcaagccagcttgtattttgctgaagatcctcccacatcactaaagtccttcaggtgtccttctcctctattcctggagaatgtaccaagtattccagtggaagatgatgaaagccagaataacaatttactaccttctgatgaaggcctgaggatagacagaatgactcagaaaactccttttgaatgcagccagtctgaggttatgtttctgagcttggacaaaaagccagagagcaagagaaatgaggaagcttgcaacatgcccagttcttcttgtgaagaaagttggttcccaaagtatatagttccatcccaggacttaaggccctataaggtaaatatagatccttcttcagaagctccagggcattcttgcaggagcaggccagtggagagcagctgttcctccaaattttcctgggatgaatatgaacagtacaaaaaagaataa

SEQ ID NO: 77 - DNA, 2243 bp, Murine sp.
atgtggaagagatttttatcagaactggaagttctactcctgttccgtcacccccacatactagagctggctgcatatttcacggagactgagaaactttgtctggtttatccctatatgagcaacgggacgcttttcgacagattacagtgcacaaatggcacaaccccgctttcctggcacgttcgaatcagcgtattgataggaatagccaaagccatccaatacttgcacaacactcagccgtgcgccgtcatctgtggcaacgtttccagtgcaaacatactcttggatgaccagctccaacccaaactaacggattttgctgcagcgcacttccgacccaatctagagcagcagagttctaccataaatatgaccggcggtggcaggaaacatctgtggtacatgccagaagaatacatcagacagggaagactttccgttaaaactgatgtctacagcttcggaatcgtgatcatggaggttctaacgggctgcaaagtggtgctggatgacccgaaacacgttcagctgcgggacctcctcatggaactgatggagaaaagaggcctagactcctgcctgtccttcttagacaggaagataccaccctgtcctcggaacttctctgcaaagctcttctctctggcgggccggtgtgtggcaacgaaggccaagttaagacccacgatggacgaagtcctgtcctctctggagagcacccagcctagcttgtattttgcagaagaccctcccacgtccttgaagtccttcaggtgtccttctccactgttcttggataatgtcccaagtattccagtagaagatgatgaaaaccagaataaccattcagtacctcccaaggaagttttggggacagatagagtgactcagaaaaccccctttgaatgcagccagtctgaggtcacctttctaggcttggaccgaaacagagggaacaggggaagtgaagcggattgcaacgtgcccagttcttctcatgaggaatgctggtccccagagcttgtggcgccatcccaggacttaagtcctactgtgatcagtttgggctcgtcttgggaagtaccaggccattcttatgggagcaagccaatggagaagaggtgttcctctgggctcttttgcagtgagcatgaacagtccaaaaagcagtgaatccaccagaagatcaagcaaaaaataaaagcaaacgtcactgaaggcactgagcaaatagcatccccgtgaaaagacacgagctctgagctccgtgagtacagccaagggaccaactgatggagaatttgaatggtgcagattagcagcaaggaagtctattccttcctccaaacagaataatttcaagagatgctttattcaagtgaccgcctctcagtcaaacctgagaagctaaactggagccaatcagaattatccaagattccgggttctgacaaccaaaacctagcaaagagtagcaggacaagtctctctcttaagtctctcactctctctcatcatccgagtgagatcttggtataggtgaacagagaaccacccaccttccagaaccagaaccaccttctccccaagccagcagtcagtcactcaccatcagcagccagtagtcaccagcagccaatcatgatacagtgtcactctccctctgcgcatgccctacgtcctttataaaacccaggtcttcagggcccacccctttctttttccatccttgctcagaggcagccttttgtatacattccctgaccccaccccaattatatctctcatatgatatctgttgcgtagtgtgactttgtggcatgacttggttgtcagatcatttgcacaagaacaagcgaatacacaacaacaaagcccaccatcattaccaccggcacttaatgctagtctttctgctagggatactgacagtctatttgcttcccatggtcatagggaagttgctcaaatgcaaaggttgtagggaatgtctaatttgtaaatggcgtcgggtgcctttggaaggaattgtgtttttacagccagttgctactcttgtttatcgctggttaaccggtctgtccggaagtgagccaagtcatccttgctagggctttttctgtgtagagagggaattccagtccaaagtctgcttctctgtatttaaattcttagaagagttgcctgtggcattccaattgttatataaaaaaattatattaaagaattccagcact

SEQ ID NO: 78 - DNA, 2769 bp, Homo sapiens
atggcgagtgcggtcagggggtcgaggccgtggccccggctggggctccagctccagttcgcggcgctgctgctcgggacgctgagtccacaggttcatactctcaggccagagaacctcctgctggtgtccaccttggatggaagtctccacgcactaagcaagcagacaggggacctgaagtggactctgagggatgatcccgtcatcgaaggaccaatgtacgtcacagaaatggcctttctctctgacccagcagatggcagcctgtacatcttggggacccaaaaacaacagggattaatgaaactgccattcaccatccctgagctggttcatgcctctccctgccgcagctctgatggggtcttctacacaggccggaagcaggatgcctggtttgtggtggaccctgagtcaggggagacccagatgacactgaccacagagggtccctccaccccccgcctctacattggccgaacacagtatacggtcaccatgcatgacccaagagccccagccctgcgctggaacaccacctaccgccgctactcagcgccccccatggatggctcacctgggaaatacatgagccacctggcgtcctgcgggatgggcctgctgctcactgtggacccaggaagcgggacggtgctgtggacacaggacctgggcgtgcctgtgatgggcgtctacacctggcaccaggacggcctgcgccagctgccgcatctcacgctggctcgagacactctgcatttcctcgccctccgctggggccacatccgactgcctgcctcaggcccccgggacacagccaccctcttctctaccttggacacccagctgctaatgacgctgtatgtggggaaggatgaaactggcttctatgtctctaaagcactggtccacacaggagtggccctggtgcctcgtggactgaccctggcccccgcagatggccccaccacagatgaggtgacactccaagtctcaggagagcgagagggctcacccagcactgctgttagatacccctcaggcagtgtggccctcccaagccagtggctgctcattggacaccacgagctacccccagtcctgcacaccaccatgctgagggtccatcccaccctggggagtggaactgcagagacaagacctccagagaatacccaggccccagccttcttcttggagctattgagcctgagccgagagaaactttgggactccgagctgcatccagaagaaaaaactccagactcttacttggggctgggaccccaagacctgctggcagctagcctcactgctgtcctcctgggagggtggattctctttgtgatgaggcaggtggtggagaagcagcaggagacccccctggcacctgcagactttgctcacatctcccaggatgcccagtccctgcactcgggggccagccggaggagccagaagaggcttcagagtccctcaaagcaagcccagccactcgacgaccctgaagctgagcaactcaccgtagtggggaagatttccttcaatcccaaggacgtgctgggccgcggggcaggcgggactttcgttttccggggacagtttgagggacgggcagtggctgtcaagcggctcctccgcgagtgctttggcctggttcggcgggaagttcaactgctgcaggagtctgacaggcaccccaacgtgctccgctacttctgcaccgagcggggaccccagttccactacattgccctggagctctgccgggcctccttgcaggagtacgtagaaaacccggacctggatcgcgggggtctggagcccgaggtcgtgctgcagcagctgatgtctggcctggcccacctgcactctttacacatagtgcaccgggacctgaagccaggaaatattctcatcaccgggcctgacagccagggcctgggcagagtggtgctctcagacttcggcctctgcaagaagctgcctgctggccgctgtagcttcagcctccactccggcatccccggcacggaaggctggatggcgcccgagcttctgcagctcctgccaccagacagtcctaccagcgctgtggacatcttctctgcaggctgcgtgttctactacgtgctttctggtggcagccacccctttggagacagtctttatcgccaggcaaacatcctcacaggggctccctgtctggctcacctggaggaagaggtccacgacaaggtggttgcccgggacctggttggagccatgttgagcccactgccgcagccacgcccctctgccccccaggtgctggcccaccccttcttttggagcagagccaagcaactccagttcttccaggacgtcagtgactggctggagaaggagtccgagcaggagcccctggtgagggcactggaggcgggaggctgcgcagtggtccgggacaactggcacgagcacatctccatgccgctgcagacagatctgagaaagttccggtcctataaggggacatcagtgcgagacctgctccgtgctgtgaggaacaagaagcaccactacagggagctcccagttgaggtgcgacaggcactcggccaagtccctgatggcttcgtccagtacttcacaaaccgcttcccacggctgctcctccacacgcaccgagccatgaggagctgcgcctctgagagcctcttcctgccctactacccgccagactcagaggccaggaggccatgccctggggccacagggaggtga

SEQ ID NO: 79 - DNA, 1857 bp, Homo sapiens
ggagggttcgaattgcaacggcagctgccgggcgtatgtgttggtgctagaggcagctgcagggtctcgctgggggccgctcgggaccaattttgaagaggtacttggccacgacttattttcacctccgacctttccttccaggcggtgagactctggactgagagtggctttcacaatggaagggatcagtaatttcaagacaccaagcaaattatcagaaaaaaagaaatctgtattatgttcaactccaactataaatatcccggcctctccgtttatgcagaagcttggctttggtactggggtaaatgtgtacctaatgaaaagatctccaagaggtttgtctcattctccttgggctgtaaaaaagattaatcctatatgtaatgatcattatcgaagtgtgtatcaaaagagactaatggatgaagctaagattttgaaaagccttcatcatccaaacattgttggttatcgtgcttttactgaagccaatgatggcagtctgtgtcttgctatggaatatggaggtgaaaagtctctaaatgacttaatagaagaacgatataaagccagccaagatccttttccagcagccataattttaaaagttgctttgaatatggcaagagggttaaagtatctgcaccaagaaaagaaactgcttcatggagacataaagtcttcaaatgttgtaattaaaggcgattttgaaacaattaaaatctgtgatgtaggagtctctctaccactggatgaaaatatgactgtgactgaccctgaggcttgttacattggcacagagccatggaaacccaaagaagctgtggaggagaatggtgttattactgacaaggcagacatatttgcctttggccttactttgtgggaaatgatgactttatcgattccacacattaatctttcaaatgatgatgatgatgaagataaaacttttgatgaaagtgattttgatgatgaagcatactatgcagcgttgggaactaggccacctattaatatggaagaactggatgaatcataccagaaagtaattgaactcttctctgtatgcactaatgaagaccctaaagatcgtccttctgctgcacacattgttgaagctctggaaacagatgtctagtgatcatctcagctgaagtgtggcttgcgtaaataactgtttattccaaaatatttacatagttactatcagtagttattagactctaaaattggcatatttgaggaccatagtttcttgttaacatatggataactatttctaatatgaaatatgcttatattggctataagcacttggaattgtactgggttttctgtaaagttttagaaactagctacataagtactttgatactgctcatgctgacttaaaacactagcagtaaaacgctgtaaactgtaacattaaattgaatgaccattacttttattaatgatctttcttaaatattctatattttaatggatctactgacattagcactttgtacagtacaaaataaagtctacatttgtttaaaacactgaaccttttgctgatgtgtttatcaaatgataactggaagctgaggagaatatgcctcaaaaagagtagctccttggatacttcagactctggttacagattgtcttgatctcttggatctcctcagatctttggtttttgctttaatttattaaatgtattttccatactgagtttaaaatttattaatttgtaccttaagcatttcccagctgtgtaaaaacaataaaactcaaataggatgataaagaataaaggacactttgggtaccagaaggtgtctcagcattattttatacttc

SEQ ID NO: 80 - DNA, 1251 bp, Murine sp.
atctccaagagggttgtctcattctccttgggccgtgaaaaagataagtcttttatgcgatgatcattatcgaactgtgtatcagaagagactaactgatgaagctaagattttaaaaaaccttaatcacccaaacattataggatatcgtgcttttactgaagccagtgatggtagtctgtgccttgctatggagtatggaggtgaaaagtctctgaatgacttaatagaagagcggaacaaagacagtggaagtccttttccagcagctgtaattctcagagttgctttgcacatggccagagggctaaagtacctgcaccaagaaaagaagctgcttcatggagacataaagtcttcaaatgttgtaattaaaggtgattttgaaacaattaaaatctgtgatgtaggagtctctctgccattggatgaaaatatgactgtgactgatcctgaggcctgttatattggtactgagccatggaaacccaaggaagcgttggaagaaaatggcatcattactgacaaggcagatgtgtttgcttttggccttactctgtgggaaatgatgactttatgtattccacacgtcaatcttccagatgatgatgttgatgaagatgcaacctttgatgagagtgacttcgatgatgaagcatattatgcagctctggggacaaggccatccatcaacatggaagagctggatgactcctaccagaaggccattgaactcttctgtgtgtgcactaatgaggatcctaaagatcgcccgtctgctgcacacatcgttgaagctttggaactagatggccaatgttgtggtctaagctcaaagcattaacttgtatgggaactgttaactagatatatgtagttaatataacttatggtagctagattctagaagtagctttaacactagtgacccctgtctaagatgacttaagaatcaagggaccattgctttgttacagatctttttagatattcttgcttctttagtgggttactaaaaatttcactacgtacatgtggtacagatatctgtctgctcatagtgtcagtccttcagctggcctgtcagcccatgcgccctgggacttgagaagagttcataaacgtagctcctagggtgtcttgcctctctacacttagcttctaatttattactttgtttctactgattgtgtcttaagtcttttaaaataaatgtaagaataaacaataaaagacagttttagtaccagg

SEQ ID NO: 81 - DNA, 140 bp, Murine sp.
gctgctggacagtgacttgtatttaccgtggactgtgagagtgaaactggcctatggcatagcagtgggcctcagctaccttcacttcaaaggcattttccatcgggacctcacatcaaaggtgtgaaggctttgctttc

SEQ ID NO: 82 - DNA, 2403 bp, Homo sapiens
atgtcgtctctcggtgcctcctttgtgcaaattaaatttgatgacttgcagttttttgaaaactgcggtggaggaagttttgggagtgtttatcgagccaaatggatatcacaggacaaggaggtggctgtaaagaagctcctcaaaatagagaaagaggcagaaatactcagtgtcctcagtcacagaaacatcatccagttttatggagtaattcttgaacctcccaactatggcattgtcacagaatatgcttctctgggatcactctatgattacattaacagtaacagaagtgaggagatggatatggatcacattatgacctgggccactgatgtagccaaaggaatgcattatttacatatggaggctcctgtcaaggtgattcacagagacctcaagtcaagaaacgttgttatagctgctgatggagtattgaagatctgtgactttggtgcctctcggttccataaccatacaacacacatgtccttggttggaactttcccatggatggctccagaagttatccagagtctccctgtgtcagaaacttgtgacacatattcctatggtgtggttctctgggagatgctaacaagggaggtcccctttaaaggtttggaaggattacaagtagcttggcttgtagtggaaaaaaacgagagattaaccattccaagcagttgccccagaagttttgctgaactgttacatcagtgttgggaagctgatgccaagaaacggccatcattcaagcaaatcatttcaatcctggagtccatgtcaaatgacacgagccttcctgacaagtgtaactcattcctacacaacaaggcggagtggaggtgcgaaattgaggcaactcttgagaggctaaagaaactagagcgtgatctcagctttaaggagcaggagcttaaagaacgagaaagacgtttaaagatgtgggagcaaaagctgacagagcagtccaacaccccgctgctgccttcctttgagattggtgcatggacggaagacgatgtgtattggtgggttcagcagctcgtcagaaaaggtgactcttcagcagagatgagtgtatatgcaagcttgtttaaagaaaacaacattacagggaagcggctgctgctgctggaggaagaagacctgaaagacatgggcattgtctccaaggggcatatcattcacttcaagtcagccattgagaaattaacccatgattacataaatttgtttcacttcccaccactaattaaggactcaggaggtgaacctgaagaaaatgaggaaaaaatagtgaacctggaactggtttttggttttcacttgaaaccaggaactggcccacaggattgtaagtggaaaatgtatatggagatggatggggatgaaattgcaataacctacataaaagatgtgacattcaacactaacctacctgatgcggagattttaaagatgacaaagccaccatttgtaatggagaagtggattgtaggaatagcaaaaagtcagactgtggagtgcactgtcacatatgagagtgatgttagaactccaaaaagcactaaacatgtccatttgattcagtggagtagaacaaaacctcaggatgaagtgaaagcagtccaacttgccattcagacattattcaccaattcagatggcaaccctggaagcaggtccgactcaagtgctgattgccagtggttagatactctgaggatgcggcagattgcatccaacacttctttacagcgttcccagagcaatcctattctggggtcaccgttcttctcacactttgatggccaggattcctacgctgctgctgtgagacggccccaggtgcccattaagtatcaacagattacacctgtgaaccagtccagaagctcgtctcctactcagtatggactgaccaaaaacttctcttccttacatctcaactctagggacagtggcttttccagtggcaatactgacacctcttcagagaggggtcgatactcagacagaagcaggaacaaatatggacgtggtagtatatcactcaattcttctcctagaggaagatacagtggaaagagtcagcattccactccatcaagaggaagataccctggaaagttctacagggtttctcagtcagcactcaatcctcaccagtcgcctgacttcaagagaagccccagggacctccaccaacccaacaccataccagggatgcctttgcaccctgagactgactcaagagccagtgaagaggacagcaaagtcagcgaagggggctggacaaaagtggaataccggaaaaagccccacaggccatctcccgccaaaaccaataaagagagagccagaggggaccaccgtggatggagaaacttttga

SEQ ID NO: 83 - DNA, 2508 bp, Homo sapiens
atgggaaattataaatctagaccaacccaaacttgtactgatgaatggaagaaaaaagtcagtgaatcatatgttatcacaatagaaagattagaagatgacctgcagatcaaggaaaaagaactgacagaactaaggaatatatttggctctgatgaagccttcagtaaagtcaatttaaattaccgcactgaaaatgggctgtctctacttcatttatgttgcatttgtggaggcaagaaatcacatattcgaactcttatgttgaaagggctccgcccatctcgactgacaagaaatggatttacagccttgcatttagcagtttacaaggataatgcagaattgatcacttctctgcttcacagtggagctgatatacagcaggttggatacggtggcctcactgccctccatattgctacaatagctggccacctagaggctgctgatgtgctgttgcaacatggagctaatgtcaatattcaagatgcagtttttttcactccattgcatattgcagcgtactatggacatgaacaggtaactcgccttcttttgaaatttggtgctgatgtaaatgtaagtggtgaagttggagatagacccctccacctagcatctgcaaaaggattcttgaatattgcaaaactcttgatggaagaaggcagcaaagcagatgtgaatgctcaagataatgaagaccatgtcccactccatttctgttctcgatttggacaccatgatatagttaagtatctgctgcaaagtgatttggaagttcaacctcatgttgttaatatctatggagatacccccttacacctggcatgctacaatggcaaatttgaagttgccaaggaaatcatccaaatatcaggaacagaaagtctgactaaggaaaacatcttcagtgaaacagcttttcatagtgcttgtacctatggcaagagcattgacctagtcaaatttcttcttgatcagaatgtcataaacatcaaccaccaaggaagggatgggcacactggattacactctgcttgctaccacggtcacattcgcctggttcagttcttactggataatggagctgatatgaatctagtggcttgtgatcccagcaggtctagtggtgaaaaagatgagcagacatgtttgatgtgggcttatgaaaaagggcatgatgccattgtcacactcctgaagcattataagagaccacaagatgaattgccctgtaatgaatattctcagcctggaggagatggctcctatgtgtctgttccatcacccttggggaagattaaaagcatgacaaaagagaaggcagatattctcctcctaagagctggattgccttcacatttccatcttcagctctcagaaattgagttccatgagattattggctcaggttcttttgggaaagtatataaaggacgatgcagaaataaaatagtggctataaaacgttatcgagccaatacctactgctccaagtcagatgtggatatgttttgccgagaggtgtccattctctgccagctcaatcatccctgcgtaattcagtttgtgggtgcttgcttgaatgatcccagccagtttgccattgtcactcaatacatatcagggggttctctgttctccctccttcatgagcagaagaggattcttgatttgcagtctaaattaattattgcagtagatgttgccaaaggcatggagtaccttcacaacctgacacagccaattatacatcgtgacttgaacagtcacaatattcttctctatgaggatgggcatgctgtggtggcagattttggagaatcaagatttctacagtctctggatgaagacaacatgacaaaacaacctgggaacctccgttggatggctcctgaggtgttcacgcagtgcactcggtacaccatcaaagcagatgtcttcagctatgctctgtgtctgtgggaaattctcactggcgaaattccattcgctcatctcaagccagcggctgcggcagcagacatggcttaccaccacatcagacctcccattggctattccattcccaagcccatatcatctctgctgatacgagggtggaacgcatgtcctgaaggaagacccgaattttctgaagttgtcatgaagttagaagagtgtctctgcaacattgagctgatgtctcctgcatcaagtaacagcagtgggtctctctcaccttcttcttcttctgattgcctggtgaaccggggaggacctggccggagtcatgtggcagcattaagaagtcgtttcgaattggaatatgctctaaatgcaaggtcctatgctgctttgtcccaaagtgctggacaatattcctctcaaggtctgtctttggaggagatgaaaagaagtcttcaatacacacccattgacaaatatggctatgtatccgatcccatgagctcaatgcattttcattcttgccgaaatagtagcagctttgaggacagcagctga

SEQ ID NO: 84 - DNA, 2364 bp, Homo sapiens
  modified_base (17): a, t, c, g, other or unknown
atgatttcttgcctgtnataacctatgcactcacaaagatgaactctctgagagggatgagcaagagcttcaggaaatccgaaagtatttctcctttcctgtattctttttcaaagtgccgaaactgggctcggagataatagactcctcaaccaggagaatggagagcgaaagatcaccgctttatcgccagctaattgacctgggctatctgagcagcagtcactggaactgtggggctcctggccaggatactaaagctcagagcatgttggtggaacagagtgaaaagctgagacacttgagcacattttctcaccaggtgttacagactcgcctggtggatgcagccaaggccctgaacctggtgcactgccactgccttgacatctttattaaccaggcatttgacatgcagcgggacctgcagatcactcccaaacgtctggaatatactcgaaaaaaggagaatgagttgtatgaatcattgatgaatattgccaaccgaaagcaggaggaaatgaaggatatgattgttgagacacttaataccatgaaggaggaacttctggatgatgctactaacatggagtttaaagacgtcattgtccctgagaatggagaaccagtaggcaccagagagatcaaatgctgcatccgacagatccaggaactcatcatctcccgacttaatcaggcagtggctaataagctgatcagctcagtggattacctgagggaaagcttcgtcggaaccctggaacgatgtctgcagagcctggagaagtctcaggatgtctcagttcacatcaccagtaattatctcaaacagatcttaaatgctgcctatcatgttgaagtcacgtttcactcagggtcgtcagttacaaggatgctatgggagcaaatcaaacagatcatccagcgcatcacatgggtgagcccacctgccatcactctggaatggaagaggaaggtggcccaggaagccattgagagcctcagcgcctccaaattggctaagagcatttgcagccaattccggactcggctcaatagttcccacgaggcttttgcagcctccttgcggcagctggaagctggccactcaggccggttagagaaaacggaagatctatggctgagggttcggaaagatcatgctccccgcctggcccgcctttctctggaaagccgttctttacaggatgtcttgcttcatcgtaaacctaaactgggacaggaactgggccggggccagtatggtgtggtatacctgtgtgacaactggggaggacacttcccttgtgccctcaaatcagttgtccctccagatgagaagcactggaatgatctggctttggaatttcactatatgaggtctctgccgaagcatgagcgattggtggatctccatggttcagtcattgactacaactatggtggtggctccagcattgctgtgctcctcattatggagcggctacaccgggatctctacacagggctgaaggctgggctgaccctggagacacgtttgcagatagcactagatgtggtggagggaatccgcttcctgcacagccagggacttgtccatcgtgatatcaaactgaaaaatgtgctgctggataagcagaaccgtgccaagatcactgacttaggattctgcaagccagaggccatgatgtcaggcagcattgtggggacaccaatccatatggcccctgaacttttcacagggaagtacgataattccgtggatgtctacgcttttggaattcttttctggtatatctgctcaggctctgtcaagctccctgaggcatttgagaggtgtgctagcaaagaccatctctggaacaatgtgcggaggggggctcgcccagaacgtcttcctgtgtttgatgaggagtgctggcagttgatggaagcctgttgggatggcgaccccttgaagaggcctctcttgggcattgtccagcccatgctccagggcatcatgaatcggctctgcaagtccaattctgagcagccaaacagaggactagatgattctacttgaaagcaaagacctttctctttcactctctagttatttccttccccctcaccatttggccatggggagaatttgacatttattcactataggacacactcccaagggaactggtgcttgctgggaaacttggaaccttcccaggcagggatgactcctggacagtgaagagttgaatgactgagcatattcagcagctcactgaagcgccaagctatccctttagcaaaaaagtgtctcagatgtgtaaaagctgaggaatgtggtgttctggcttcacaaatgaaaaggaggcagatgtt

SEQ ID NO: 85 - DNA, 1073 bp, Murine sp.
ttgatgtcaacctgaaggcttctaaagcgagtgatgtctacagctttgggatcctcgtgtgggcagtgctggctggcagagaagctgagttggtagacaagacttcactaatccgggaaacagtgtgtgacaggcagagtcgtcctccactgacagagctgcctccaggtagccctgagactcccggcttggaaaaactgaaggagttaatgattcattgctggggttcccagtccgaaaacaggccatccttccaggactgcgaaccaaaaaccaatgaagtttacaatctggtaaaggacaaggtagatgctgctgtctccgaggtaaagcattatctgtctcagcacagaagcagcggcagaaacttgtctgccagagagccaagccaaagaggcacagaaatggattgcccgagggaaaccatggtttctaaaatgctggaccgcctgcatttggaggaaccctccggaccagttcctggaaaatgtcctgagaggcaagcacaggacacatcagttgggcctgccacaccagcaaggacatcttctgaccccgtggctggcactcctcagattccacatactttacccttcagaggcacaacacctgggccagtctttactgagactcccggtcctcacccccaaaggaatcagggagatggaagacacggcactccttggtatccctggaccccaccgaatccaatgacagggccaccggctctcgtcttcaacaactgttctgaagtgcagattgggaactacaactccttggtagcaccaccaagaactactgcctcaagttcggccaagtatgaccaagcacagttcggcaggggtaggggctggcagcccttccacaagtagacttcagagaatcactgcaagagcctgaagtgtgccattcagcgtggcaataaaaagcacgttttaagcaacctggactggctaagacagtccttgccacttcctgaagctcacaacattctgtgaggacagttggacctacacccaaactgactcttgacccatctccttaaagtcaataaacatagcatgttaactgtg

SEQ ID NO: 86 - DNA, 2067 bp, Homo sapiens
atgggatcagagaacagtgctttaaagagctatacactgagagaaccaccatttaccttaccctctggacttgctgtttatcccgctgtactgcaagatggcaaatttgcttcagtttttgtgtataagagagaaaatgaagacaaggttaataaagctgccaagcatttgaagacacttcgtcacccttgcttgctaagatttttatcttgtactgtggaagcggatggcattcatcttgtcactgagcgagtacagcccctggaagtggctttggaaacattgtcttctgcagaggtctgtgctgggatctatgacatattgctggctcttatcttccttcatgacagaggacacctaacacacaataatgtctgtttatcatctgtgtttgtgagtgaagatggacactggaagctaggaggaatggaaactgtttgtaaagtttctcaggccacaccagagtttctgaggagtattcagtcaataagagacccagcatctatccctcctgaagagatgtctccagaattcacaactctcccagagtgtcatggacatgcccgggatgccttttcatttggaacattggtggaaagtttgctcacaatcttaaatgaacaggtttcagcggatgttctctccagctttcaacagaccttgcactcaactttgctgaatcccattccaaaatgtcggccagcgctctgcaccttactatctcatgacttcttcagaaatgattttctggaagttgtgaatttcttgaaaagtttaacattgaagagtgaagaggagaaaacggaattctttaaatttctgctggacagagtcagctgcttgtcagaggaattgatagcttcaaggttggtgcctcttctgcttaatcagttggtgtttgcagagccagtggctgttaagagttttcttccttatctgcttggccccaaaaaagatcatgcgcagggagaaactccttgcttgctctcaccagccctgttccagtcacgggtgatccccgtgcttctccagttgtttgaagttcatgaagagcatgtgcggatggtgctgctgtctcacatcgaggcctacgtggagcacttcactcaggagcagctgaagaaagtcatcttgccacaggttttgctgggcctgcgtgatactagcgattccattgtggcaattactctgcatagcctagcagtgctggtctctctgcttggaccagaggtggttgtgggaggagaacgaaccaagatcttcaaacgcactgccccaagttttactaaaaatactgacctttctctagaaggcgatccattttctcagcctattaaatttcccataaatggactctcagatgtaaaaaatacttcggaggacagtgaaaacttcccatcaagttctaaaaagtctgaggagtggcctgactggagtgaacctgaggagcctgaaaatcaaactgtcaacatacagatttggcctagagaaccttgtgatgatgtcaagtcccagtgcactaccttggatgtggaagagtcatcttgggatgactgcgagcccagcagcttagatactaaagtaaacccaggaggtggaatcactgctacaaaacctgttacctcaggggagcagaagcctattcctgctttgctttcactcactgaagagtctatgccttggaaatcaagcttaccccaaaagattagccttgtacaaaggggggatgacgcagaccaaatcgagccgccaaaagtgtcatcacaagaaaggccccttaaggttccatcagaacttggtttaggagaggaattcaccattcaagtaaaaaagaagccagtaaaagatcctgagatggattggtttgctgatatgatcccagaaattaagccttctgctgcttttcttatattacctgaactgaggacagaaatggtcccaaaaaaggatgatgtctccccagtgatgcagttttcctcaaaatttgctgcagcagaaattactgagggagaggctgaaggctgggaagaagaaggggagctgaactgggaagataataactggtga

SEQ ID NO: 87 - DNA, 1739 bp, Homo sapiens
agcggccgcgggggcggcggaggatatggagtaaagccagagtcagtggccaggcacgaaggcagagcaggaacagccaggaggcgtttattaggggggcggggggaaagagccccagcaccgcccctcctggaagaaggaagaggtaactataactacccaatattgcagccatggagtccatgcttaataaattgaagagtactgttacaaaagtcacagctgatgtcactagtgcggtaatgggaattcctgtcactagagaatttgatgttggtcgacacattgccagtggttgcaatgggctagcttggaagatttttaatggcacaaaaaagtcaacaaagcaggaagtggcagtttttgtctttgataaaaaactgattgacaagtatcaaaaatttgaaaaggatcaaatcattgattctctaaaacgaggagtccaacagttaactcggcttcgacaccctcgacttcttactgtccagcatcctttagaagaatccagggattgcttggcattttgtacagaaccagtttttgccagtttagccaatgttcttggtaactgggaaaatctaccttcccctatatctccagacattaaggattataaactttatgatgtagaaaccaaatatggtttgcttcaggtttctgaaggattgtcattcttgcatagcagtgtgaaaatggtgcatggaaatatcactcctgaaaatataattttgaataaaagtggagcctggaaaataatgggttttgatttttgtgtatcatcaaccaatccttctgaacaagagcctaaatttccttgtaaagaatgggacccaaatttaccttcattgtgtcttccaaatcctgaatatttggctcctgaatacatactttctgtgagctgtgaaacagccagtgatatgtattctttaggaactgttatgtatgctgtatttaataaagggaaacctatatttgaagtcaacaagcaagatatttacaagagtttcagtaggcagttggatcagttgagtcgtttaggatctagttcacttacaaatatacctgaggaagttcgtgaacatgtaaagctactgttaaatgtaactccgactgtaagaccagatgcagatcaaatgacaaagattcccttctttgatgatgttggtgcagtaacactgcaatattttgataccttattccaaagagataatcttcagaaatcacagtttttcaaaggactgccaaaggttctaccaaaactgcccaagcgtgtcattgtgcagagaattttgccttgtttgacttcagaatttgtaaaccctgacatggtaccttttgttttgcccaatgttctacttattgctgaggaatgcaccaaagaagaatatgtcaaattaattcttcctgaacttggccctgtgtttaagcagcaggagccaatccagattttgttaattttcctacaaaaaatggatttgctactaaccaaaacccctcctgatgagataaagaacagtgttctacccatggtttacagagcactagaagctccttccattcagatccaggagctctgtctaaacatcattccaacctttgcaaatcttatagactacccatccatgaaaaacgctttgataccaagaattaaaaatgcttgctacaaacatcttcccttgcggttcgtgtaaattcattaaacaacattggagcagaccttctgactggcagtgagtccg

SEQ ID NO: 88 - DNA, 2668 bp, Homo sapiens
ggcgcgccagatatcacacgtgccaaggggctggctcagccccggctcgggcggccggaggacccggagctaaggcgcccgaacccgcggcggcggtggggacgatgtggttctttgcccgggacccggtccgggactttccgttcgagctcatcccggagcccccagagggcggcctgcccgggccctgggccctgcaccgcggccgcaagaaggccacaggcagccccgtgtccatcttcgtctatgatgtgaagcctggcgcggaagagcagacccaggtggccaaagctgccttcaagcgcttcaaaactctacggcaccccaacatcctggcttacatcgatggactggagacagaaaaatgcctccacgtcgtgacagaggctgtgaccccgttgggaatatacctcaaggcgagagtggaggctggtggcctgaaggagctggagatctcctgggggctacaccagatcgtgaaagccctcagcttcctggtcaacgactgcagcctcatccacaacaatgtctgcatggccgccgtgttcgtggaccgagctggcgagtggaagcttgggggcctggactacatgtattcggcccagggcaacggtgggggacctccccgcaaggggatccccgagcttgagcagtatgaccccccggagttggctgacagcagtggcagagtggtcagagagaagtggtcagcagacatgtggcgcttgggctgcctcatttgggaagtcttcaatgggcccctacctcgggcagcagccctacgcaaccctgggaagatccccaaaacgctggtgccccattactgtgagctggtgggagcaaaccccaaggtgcgtcccaacccagcccgcttcctgcagaactgccgggcacctggtggcttcatgagcaaccgctttgtagaaaccaacctcttcctggaggagattcagatcaaagagccagccgagaagcaaaaattcttccaggagctgagcaagagcctggacgcattccctgaggatttctgtcggcacaaggtgctgccccagctgctgaccgccttcgagttcggcaatgctggggccgttgtcctcacgcccctcttcaaggtgggcaagttcctgagcgctgaggagtatcagcagaagatcatccctgtggtggtcaagatgttctcatccactgaccgggccatgcgcatccgcctcctgcagcagatggagcagttcatccagtaccttgacgagccaacagtcaacacccagatcttcccccacgtcgtacatggcttcctggacaccaaccctgccatccgggagcagacggtcaagtccatgctgctcctggccccaaagctgaacgaggccaacctcaatgtggagctgatgaagcactttgcacggctacaggccaaggatgaacagggccccatccgctgcaacaccacagtctgcctgggcaaaatcggctcctacctcagtgctagcaccagacacagggtccttacctctgccttcagccgagccactagggacccgtttgcaccgtcccgggttgcgggtgtcctgggctttgctgccacccacaacctctactcaatgaacgactgtgcccagaagatcctgcctgtgctctgcggtctcactgtagatcctgagaaatccgtgcgagaccaggccttcaaggccattcggagcttcctgtccaaattggagtctgtgtcggaggacccgacccagctggaggaagtggagaaggatgtccatgcagcctccagccctggcatgggaggagccgcagctagctgggcaggctgggccgtgaccggggtctcctcactcacctccaagctgatccgttcgcacccaaccactgccccaacagaaaccaacattccccaaagacccacgcctgaaggagttcctgccccagcccccacccctgttcctgccacccctacaacctcaggccactgggagacgcaggaggaggacaaggacacagcagaggacagcagcactgctgacagatgggacgacgaagactggggcagcctggagcaggaggccgagtctgtgctggcccagcaggacgactggagcaccgggggccaagtgagccgtgctagtcaggtcagcaactccgaccacaaatcctccaaatccccagagtccgactggagcagctgggaagctgagggctcctgggaacagggttggcaggagccaagctcccaggagccacctcctgacggtacacggctggccagcgagtataactggggtggcccagagtccagcgacaagggcgaccccttcgctaccctgtctgcacgtcccagcacccagccgaggccagactcttggggtgaggacaactgggagggcctcgagactgacagtcgacaggtcaaggctgagctggcccggaagaagcgcgaggagcggcggcgggagatggaggccaaacgcgccgagaggaaggtggccaagggccccatgaagctgggagcccggaagctggactgaaccgtggcggtggcccttcccggctgcggagagcccgccccacagatgtatttattgtacaaaccatgtgagcccggccggcccagccaggccatctcacgtgtacataatcagagccacaataaattctatttcac

SEQ ID NO: 89 - DNA, 1949 bp, Homo sapiens
atggccttcatggagaagccgccagccggcaaggtgctgctggacgacacggtgccgctgacagcagccatcgaggcgagccagagcctgcagtcccacacggaatatattattcgagtgcaaggaggaatttctgtggaaaacagctggcagattgttagaagatacagtgactttgatttgcttaacaacagcttacagattgcaggcctaagtctacctcttcctcccaaaaaattgattggtaacatggatcgtgaattcatagctgaaaggcagaaaggtcttcagaactatctcaacgtgatcacaacaaatcatatcttgtctaattgtgagctggttaagaagtttttagatccaaacaactattccgcaaactatactgagattgccttgcaacaggtttccatgttcttccgatcagagccaaagtgggaggtggtggaacctttgaaagacataggttggagaataaggaagaaatatttcttgatgaagattaaaaatcagccaaaggaacggctagtgttaagctgggctgaccttggcccagacaagtatttgtcagataaagattttcagtgtctaatcaaacttctgccttcttgtttgcacccttacatctatcgggttacctttgccacagctaatgaatcctcagcgttgctaattaggatgtttaacgaaaagggaacattgaaggatctgatctacaaggcaaaaccaaaagacccatttctaaagaagtactgcaaccctaagaagattcagggcctggaactccagcaaataaaaacatatggacggcaaatattagaggtactgaagtttcttcatgacaagggattcccttatgggcatcttcacgcctccaatgtgatgctcgatggggacacttgccggctgctggaccttgagaattccttattgggcctgccttccttctaccgatcttatttttcacaattcaggaaaatcaatacattggaaagtgtggatgtccactgctttggccacttactgtatgaaatgacttatggacgaccgccagactcggtgcctgtggactccttccctcctgccccgtccatggctgtggtggccgtgttggagtctacgctgtcttgtgaagcctgtaaaaatggcatgcctaccatctcccggctcttacagatgccattattcagcgatgttttactaaccacttctgaaaaaccacagtttaagatccctacaaagttaaaagaggcattgagaattgccaaagaatgtatagagaagagactaattgaggaacagaaacagattcaccagcatcgaagactgacaagagctcagtcccaccatggatctgaggaggaaagaaaaaaaagaaagattttagctcgaaagaagtcaaaacgatctgctcttgaaaatagtgaagagcattcagcgaagtacagcaactccaataattcagcaggatctggggccagctcacctctcacgtccccgtcatcgccaactccaccctctacatcagggatatctgcattacctccacctcctccacctccaccaccaccagcagctcccttgcctcctgcgagcaccgaggcacctgcccagctctcgtctcaggctgtgaatggcatgagccgaggggccttgctcagctccatccagaatttccaaaaaggaactttgaggaaagccaaacctgtgatcacagtgctccgaagatcggctgaagcttcctgtttacacttggagggaaaagttcttttttattcctactcacccctaccccccaactaccctcttcctgggaaagtaattgctgagccagtacagccacaaacagtactattttgcagatgctcatgtaagcagcttttcgagagaaataattctttaagcagaataaagttaggctggcatgcaaaaaaaaaaaaaaaaaaaaa

SEQ ID NO: 90 - DNA, 1602 bp, Homo sapiens
atgagcgccagcacgggcggtggtggggacagcggcggcagcggcggcagtagcagcagctcacaggcctcctgcgggcccgagtcctcgggctccgaactagccctggccacaccggtgcctcagatgctgcagggccttctgggctccgacgacgaggaacaggaagaccccaaagactactgcaagggcggctaccaccctgtgaagatcggcgacgtgttcaatgggcggtaccacgtggtgcgcaaactgggctggggccacttctccaccgtctggctctgctgggacatccagcgcaagcgctttgtggccctcaaagtggtgaagagtgcggggcattacacggagacagctgtggatgagatcaagctcctgaaatgtgtccgggacagcgaccccagtgaccccaaaagagagaccattgtccagctcattgatgacttcaggatctcaggagtcaatggagtccatgtgtgcatggtgctggaggtgctgggccaccagctcctcaaatggatcatcaagtccaactaccagggcctgcccgtgccctgcgtgaagagcatcgtgaggcaggtgctgcacggcctggactacctccacaccaagtgcaagatcatccacacggacatcaagcccgagaacatcttgctgtgtgtgggggacgcttacatcaggcgcctggctgccgaggccacggagtggcaacaggcaggggcgccgcccccctcccgctccatagtcagcactgccccccaggaggtcttgaccggtaagctgtccaaaaacaagaggaagaagatgaggcgcaaacggaaacagcagaagcggctgctggaggagcggctgcgggacctgcagaggctggaggccatggaggctgccacccaggctgaggactctggcttgagactagacgggggcagcggctccacatcctcttcaggcttctccggctccctcttctctcctgcctcctgctccatcctctccggctcgtccaatcagcgagagaccgggggcctcctgtcgcctagcacaccattcggtgcctcgaacctcctggtgaaccccctggagccccaaaatgcagataagatcaagatcaagatcgcagacctgggcaacgcctgctgggtgcacaagcacttcacggaagacatccagactcggcagtaccgggccgtcgaggtgctgatcggcgccgaatacggccccccggcagacatctggagcacagcctgcatggccttcgagctggccactggtgactacctgttcgagccgcattctggagaagactacagtcgtgatgaggaccacatcgctcacatagtggagcttctgggggacatccccccagccttcgccctctcaggccgctattcccgggagttcttcaaccggagaggagagctgcggcacatccacaatctcaagcactggggcctgtacgaggtactcatggaaaagtacgagtggcccctagagcaggccacacagttcagcgcctttctgctgcccatgatggagtacatccccgaaaagcgggccagtgccgctgactgcctccagcacccctggctcaacccctag

SEQ ID NO: 91 - DNA, 1038 bp, Homo sapiens
tctggccctgtccctccccaccacccgccgctgtgtccagacagagaatgttctaacgctgggggcggctgcggatgaagtccttggggagaaaaggagcaggccaagggcgatggtggagtagagctgcctctcagaggcagcatgagctgagagggtgataggaaggcggcgctagacagcatggaggactttctgctctccaatgggtaccagctgggcaagaccattggggaagggacctactcaaaagtcaaagaagcattttccaaaaaacaccaaagaaaagtggcaattaaagttatagacaagatgggagggccatcagagtttatccagagattcctccctcgggagctccaaatcgtccgtaccctggaccacaagaacatcatccaggtgtatgagatgctggagtctgccgacgggaaaatctgcctggtgatggagctcgctgagggaggggatgtctttgactgcgtgctgaatggggggccactgcctgaaagccgggccaaggccctcttccgtcagatggttgaggccatccgctactgccatggctgtggtgtggcccaccgggacctcaaatgtgagaacgccttgttgcagggcttcaacctgaagctgactgactttggctttgccaaggtgttgcccaagtcacaccgggagctgagccagaccttctgcggcagtacagcctatgctgcccccgaggtgctgcagggcattccccacgatagcaaaaaaggtgatgtctggagcatgggtgtggtcctgtatgtcatgctctgtgccagcctaccttttgacgacacagacatccccaagatgctgtggcagcagcagaagggggtgtccttccccactcatctgagcatctcggccgattgccaggacctgctcaagaggctcctggaacccgatatgatcctccggccttcaattgaagaagttagttggcatccatggctagcaagcacttgataaaagcaatggcaagtgctctccaataaagtagggggagaaagcaaa

SEQ ID NO: 92 - DNA, 1004 bp, Murine sp.
cagacggagaatgttctagccctggaggcagctgtgaatgaagtccttggggggaaaagaagcaggccgagggcgatggtggagtagagctgcctcgcagaggcagcatgagctgagagggtgacaagaaggaggcgctacacagcatggaggactttctactctccaatgggtatcagctgggcaagaccattggggaagggacctactcaaaagtcaaagaagcattttccaaaaaacatcaaagaaaagtggcaattaaaattatagacaagatgggagggccagaagagtttatccagagattcctgcctcgtgagctccagattgtccgtaccctggaccacaaaaacatcatccaggtgtatgagatgctggagtcagcagatggaaaaatctacctggtgatggaactggctgagggaggggatgtctttgactgtgtgctgaacggagggccacttcccgagagccgggccaaggccctcttccgccagatggttgaggctattcgctattgccatggctgtggcgtggcccaccgggaccttaagtgtgagaacgccttgttgcagggcttcaacctgaagctgaccgactttggctttgccaaggtgctacccaagtcacgcagggagctgagccagaccttctgtggcagcacagcctatgccgcccctgaggtgctacagggcataccccatgatagcaagaaaggtgatgtctggagcatgggtgtggtcctgtatgtaatgctctgtgcaagtctaccttttgatgacacagatatccccaagatgctgtggcagcagcagaagggggtgtccttccccactcatttgggcatctcaaccgaatgccaggacctgctcaagcggctcctggaaccagacatgatactccggccttcaatcgaagaagttagttggcacccatggctagcaagcacttgataaaagcaatggcaagtcctccccaataaagtagggggagaaagcaaactg

SEQ ID NO: 93 - DNA, 1537 bp, Homo sapiens
ctcccaaagtgctgggattacaggcgtgagccaccgcgcccggccgcacttcattctcaagttttgtggccaacgatggataggaggtggattgtgatgtattcggaacatgggaccttgaggagttccgtaaccaaaaggagaaagtaacaacagccagtggagacaaaaagaactgcttctctttctttccccctccaagttcctagtggagggctgagtccagcatcccagactcgtgtgactatataggcaagcatttggggacctacttcactttgataccctagccttcagcagctcaaggtgttggcctttggataggaggcttccaagtagtaaagctccctgctctcagcaagcccaacaccatggggaagggagatgtcttagaggcagcaccaaccaccacagcctaccattccctcatggatgaatatggttatgaggtgggcaaggccattggccatggctcctatgggtcggtatatgaggctttctacacaaagcagaaggttatggtggcagtcaagatcatctcaaagaagaaggcctctgatgactatcttaacaagttcctgccccgtgaaatacaggtaatgaaagtcttgcggcacaagtacctcatcaacttctatcgggccattgagagcacatctcgagtatacatcattctggaactggctcagggtggtgatgtccttgaatggatccagcgctacggggcctgctctgagccccttgctggcaagtggttctcccagctgaccctgggcattgcctacctgcacagcaagagcatcgtgcaccgggacttaaagttggagaacctgttgctggacaagtgggagaatgtgaagatatcagactttggctttgccaagatggtgccttctaaccagcctgtgggttgtagccctkcttaccgccaagtgaactgcttttcccacctcagccagacttactgtggcagctttgcttacgcttgcccagagatcttacgaggcttgccctacaaccctttcctgtctgacacctggagcatgggcgtcatcctttacactctagtggtcgcccatctgccctttgatgacaccaatctcaaaaagctgctaagagagactcagaaggaggtcactttcccagctaaccataccatctcccaggagtgcaaggtccaactgctcattgcctgtgtggcacaatggagaaaaactcaggcaagacctctctctcccctgctctagaacctgatcctccagatgctacgccaagccactaagcgtgccaccattctggacatcatcaaggattcctgggtgctcaagttccagcctgagcaacccacccatgagatcaggctgcttgaggccatgtgccagctccacaacaccactaaacagcaccaatccttgcaaattacgacctgaaaatggctgagggagggggctaagagaggagcaaagcaggaggtcttgggctaaaaatcttttttaccaaaaataaatctaagtctgatttagtttcatcaaaaaaa

SEQ ID NO: 94 - DNA, 1322 bp, Homo sapiens
gaccattcagacgcctccggtagtgtaaatgaggacaatgcctgctggcccacatgacggggggatgtagacggcagcggcgccagtcgctcctggcaccatggacgatgccacagtcctaaggaagaagggttacatcgtaggcatcaatcttggcaagggttcctacgcaaaagtcaaatctgcctactctgagcgcctcaagttcaatgtggctgtcaagatcatcgaccgcaggaaaacacctactgactttgtggagagattccttcctcgggagatggacatcctggcaactgtcaaccacggctccatcatcaagacttacgagatctttgagacctctgacggacggatctacatcatcatggagcttggcgtccagggcgacctcctcgagttcatcaagtgccagggagccctgcatgaggacgtggcacgcaagatgttccgacagctctcctccgccgtcaagtactgccacgacctggacatcgtccaccgggacctcaagtgcgagaaccttctcctcgacaaggacttcaacatcaagctgtctgactttggcttctccaagcgctgcctgcgggacagcaatgggcgcatcatcctcagcaagaccttctgcgggtcggcagcatatgcagcccccgaggtgctgcagagcatcccctaccagcccaaggtgtatgacatctggagcctgggcgtgatcctgtacatcatggtctgcggctccatgccctatgacgactccgacatcaggaagatgctgcgtatccagaaggagcaccgtgtggacttcccgcgctccaagaacctgacctgcgagtgcaaggacctcatctaccgcatgctgcagcccgacgtcagccagcggctccacatcgatgagatcctcagccactcgtggctgcagccccccaagcccaaagccacgtcttctgcctccttcaagagggagggggagggcaagtaccgcgctgagtgcaaactggacaccaagacaggcttgaggcccgaccaccggcccgaccacaagcttggagccaaaacccagcaccggctgctggtggtgcccgagaacgagaacaggatggaggacaggctggccgagacctccagggccaaagaccatcacatctccggagctgaggtggggaaagcaagcacctagcatgacaatggccccgttgtgtgtggtgggggtcggggttggggggcatggtgcagtcggccttcacgtaaactaagtaggcaggtaggatctgaagaaggcacaggtgcaagtaaaattcgtcaattaaaccactattttgatt

SEQ ID NO: 95 - DNA, 822 bp, Homo sapiens
atgtcgggagacaaacttctgagcgaactcggttataagctgggccgcacaattggagagggcagctactccaaggtgaaggtggccacatccaagaagtacaagggtaccgtggccatcaaggtggtggaccggcggcgagcgcccccggacttcgtcaacaagttcctgccgcgagagctgtccatcctgcggggcgtgcgacacccgcacatcgtgcacgtcttcgagttcatcgaggtgtgcaacgggaaactgtacatcgtgatggaagcggccgccaccgacctgctgcaagccgtgcagcgcaacgggcgcatccccggagttcaggcgcgcgacctctttgcgcagatcgccggcgccgtgcgctacctgcacgatcatcacctggtgcaccgcgacctcaagtgcgaaaacgtgctgctgagcccggacgagcgccgcgtcaagctcaccgacttcggcttcggccgccaggcccatggctacccagacctgagcaccacctactgcggctcagccgcctacgcgtcacccgaggtgctcctgggcatcccctacgaccccaagaagtacgatgtgtggagcatgggcgtcgtgctctacgtcatggtcaccgggtgcatgcccttcgacgactcggacatcgccggcctgccccggcgccagaaacgcggcgtgctctatcccgaaggcctcgagctgtccgagcgctgcaaggccctgatcgccgagctgctgcagttcagcccgtccgccaggccctccgcgggccaggtagcgcgcaactgctggctgcgcgccggggactccggctag

SEQ ID NO: 96 - DNA, 1066 bp, Homo sapiens
  modified_base (854)..(855): a, t, c, g, other or unknown
ctggtagagaacaggggctggtgccaaggcccatggagatgagaaaacggaagacagggatcatggaaagaattgtggggtcaggggacagtggcgggaggagctggctcaccaccctgtggacaaatcaggccttataatttgtgattctgtggctttgtctaaaagtccataaagcaccttgatatccagtctcacagactgctcacaacagtccacaaggctggtggggagtgcttcttttgaatgatatactaacgacaaaaataatagaagtgaacattctttgcaatgtccaagcagctagacacacttaagaccattaagaaagccaagaaataagacccagacaaggtgggcagaagttggaaggcaggagacaggtgtgaggaggtgggcctttctgatctgccagcccatctctcctccccttacttcctcagagtttatccagagattcctccctcgggagctccaaatcgtccgtaccctggaccacaagaacatcatccaggtgtatgagatgctggagtctgccgacgggaaaatctgcctggtgatggagctcgctgagggaggggatgtctttgactgcgtgctgaatggggggccactgcctgaaagccgggccaaggccctcttccgtcagatggttgaggccatccgctactgccatggctgtggtgtggcccaccgggacctcaaatgtgagaacgccttgttgcagggcttcaacctgaagctgactgactttggctttgccaaggtgttgcccaagtcacaccgggagctgagccagaccttctgcggcagtacagcctatgctgcccccgaggtgctgcagggcattcccnncaagatgctgtggcagcagcagaagggggtgtccttccccactcatctgagcatctcggccgattgccaggacctgctcaagaggctcctggaacccgatatgatcctccggccttcaattgaagaagttagttggcatccatggctagcaagcacttgataaaagcaatggcaagtgctctccaataaagtagggggagaaagcaaaccc

SEQ ID NO: 97 - DNA, 1636 bp, Homo sapiens
  modified_base (1200): a, t, c, g, other or unknown
  modified_base (1202)..(1203): a, t, c, g, other or unknown
  modified_base (1223): a, t, c, g, other or unknown
  modified_base (1227): a, t, c, g, other or unknown
  modified_base (1232): a, t, c, g, other or unknown
  modified_base (1234): a, t, c, g, other or unknown
  modified_base (1498): a, t, c, g, other or unknown
  modified_base (1521): a, t, c, g, other or unknown
  modified_base (1542): a, t, c, g, other or unknown
ttacagcctgttggcggagatcgggcgcggcagctacggcgtggtttatgaggcagtggccgggcgcagcggggcccgggtggcggtcaagaagatccgctgcgacgcccccgagaacgtggagctggcgctggctgaattctgggccctcaccagcctcaagcggcgccaccagaacgtcgtgcagtttgaggagtgcgtcctgcagcgcaatgggttagcccagcgcatgagtcacggcaacaagagctcgcagctttacctgcgcctggtggagacctcgctgaaaggagaaaggatcctgggttatgctgaggagccctgctatctctggtttgtcatggagttctgtgaaggtggagacctgaatcagtatgtcctgtcccggaggccagacccagccaccaacaaaagtttcatgctacagctgacgagcgccattgccttcctgcacaaaaaccatattgtgcacagggacctgaagccagacaacatcctcatcacagagcggtctggcacccccatcctcaaagtggccgactttggactaagcaaggtctgtgctgggctggcaccccgaggcaaagagggcaatcaagacaacaaaaatgtgaatgtgaataagtactggctgtcctcagcctgcggttcggacttctacatggctcctgaagtctgggagggacactacacagccaaggcggacatctttgccctgggcattatcatctgggcaatgatagaaagaatcacttttattgactctgagaccaagaaggagctcctggggacctacattaaacaggggactgagatcgtccctgttggtgaggcgctgctagaaaacccaaagatggagttgcacatcccccaaaaacgcaggacttccatgtctgaggggatcaagcagctcttgaaagatatgttagctgctaacccacaggaccggcctgatgcctttgaacttgaaaccagaatggaccaggtcacatgtgctgcttaaaattcagggctaagcattttgggtgattttaaactaggtcgattcctcgggacccacagtctcaccacgtctcctccagaggacggcagagggtacaggtggtggcctggccggttggcgatctcccgacagctggatccggcaatgtgaagcttttgtttgggtttccccgcttctttttagttttgctttatttntnnccttttcttttctttttttntttnccacntncctttttttaaatttaaaccattgagacttcagaagagcaggacacaatgctgtggacaggcaccaatttctttaaagaaattcaatgtgggcaaggcatatgtgtaaatttcacttttactttttataaggggttagggagctatttttggttttgtccttcactttccctctgtcttccttctttatacttttctcagttctacttatgacacctcacttccctagagaaggcctgcctccccatagggaatctgggggtancttctggaacggggcgtgagganacaaggagcctctgggccacncctccctaccagatgcaggaactcctggactccttggtgggctggccctggctagcccttgggcctcggagatgatcagaggtgaagaaccgcc

SEQ ID NO: 98 - DNA, 1490 bp, Murine sp.
ccgttgctgctccccccgccccccgcagccatggaaacggggaaagagaacggagcccgcagagggacaaaaagcccggagcggaaaaggcgaagcccagtccagcgggtactgtgcgagaagctgaggccggcggcccaggccatggatccggctggggccgaggtcccgggcgaggccttcctggcccggcggcggccggatggcggcggcggggatgttcctgcacggccgcgctacagcctcttggcggagatcgggcgcggcagctacggcgtggtttatgaggctgtggctgggcgcagtggggccagggtggcagtcaagaagatccgctgcgacgctcccgagaacgtggagttggcactagcagaattctgggccctcaccagtctcaagcggcggcaccagaatatcgtgcagtttgaggagtgcgtcctacagcgcaacgggttagcccagcgcatgagtcacggcaacaagaactcacagctttacctgcgcctggtggagacctcgctcaaaggagaaaggatcctgggctatgctgaggagccctgctatctctggtttgtcatggagtactgtgaaggtggagacctcaatcagtatgtcctgtcccggagacctgacccagccaccaacaaaagtttcatgctacagcttacaagcgccattgccttcctgcataaaaaccacatcgtgcacagggacctaaagccagacaacatcctgatcacagagcggtctggcacccccatcctcaaggtggcagactttggactgagcaaggtctgtgcagggctggcaccccgaggcaaagagggcaatcaagataacaaaaatgtgaatgtgaataaatactggctgtcctcagcttgtggctcagacttctacatggctcccgaagtctgggagggacactatacagccaaggcggacatctttgctctgggcattatcatctgggcaatgatagaaagaattacctttattgactctgaaaccaagaaggagctcctggggacctacattaagcaagggactgagatcgtccctgttggtgaggcgctgctagaaaacccaaagatggagttgcatatcccccagaaacgtaggacttccatgtctgagggggtcaagcagctcttgaaagacatgttagctgctaacccacaggaccgacctgatgcttttgaacttgaaacccgaatggaccaggtcacatgtgctgcttaaactccagggctgaacgtcttgggtgtttttaaactaggtcgatccttcgggacccacagtctcatcgtgtctcggacaggatggcagagggtacaggtggtggtgatctcctgacagctggacctcccacaatgtgaagctcacgcttgggctgcccactctacccttctctttctccttcagtagaataataattgtttttctaaacattaaaccatcaagacttctgaagagcagaaggctacactctg

SEQ ID NO: 99 - DNA, 2011 bp, Homo sapiens
  modified_base (1822): a, t, c, g, other or unknown
  modified_base (1832)..(1833): a, t, c, g, other or unknown
cgrccgcgctacggaaagccggaggggggcggggccgtcggcgtaagggggtgtgtccgcgcgcaccacgggggcgcgcgccggctgctgactggaggcggcggcagcggaggcgcgagctgcccgataatggcggcctgcagagcccatgagagggagaagcggcagcgtctaccctgagaaacctcgaccttgaagatggtgagtagccagccaaagtacgatctaatacgggaggtaggccgaggtagttacggtgttgtgtatgaagcagtcatcagaaagacctctgcacgggtggcagtgaagaaaattcgatgtcacgcacctgaaaatgttgaactagcccttcgtgagttctgggcactaagcagtatcaagagccaacatccaaatgtgattcacttggaggaatgcatcctacaaaaggatgggatggtgcaaaagatgtcccacggctctaattcttccctttatttacagcttgtagaaacttcattaaaaggagaaattgcctttgatcccagaagcgcctattatttgtggtttgtgatggatttttgtgacggaggagatatgaatgagtatctgttgtccaggaagcccaatcgtaaaactaacaccagcttcatgcttcagctgagcagtgccctggctttcttgcataaaaaccagatcatccaccgagatcttaagcctgataacatcctgatttctcaaaccaggttggataccagtgacttggaacctaccctcaaagtggctgattttggtctaagtaaagtttgttcagcctctgggcagaacccagaagaacctgtcagtgtaaacaagtgtttcctttccacagcatgtggaacagatttttacatggctcctgaagtttgggaaggacattacacagcaaaagctgacatctttgctctggggattatcatctgggcaatgctggaaaggatcacattcatagacacagagacaaagaaggaactcttggggagttatgtaaaacaaggaactgagattgtgcctgttggggaggcacttctggaaaatcccaaaatggaacttctcattcctgtgaagaaaaaatctatgaatgggcgaatgaaacaactgattaaggaaatgctggctgcaaaccctcaggatcgtccagatgcttttgaactagaactcagattagtacaaattgcatttaaagatagcagctgggaaacgtgacacatattatttgcaaataccatggatgatatgctgcttctgtttaacagtgatgcaacattatgtggctgaaaaagaatataaaaagctagactctaccctctaagggtttagattttttgtgggattttttttttcctcatttttcttaaatccaagttggccgttttattagtatgtttcaaatgtgtattaccaatgtgggtgtaaatttttaaaaaatgattattgatagaagtttggcaggaaaattctttaagagctaacaagagaagagagtccagttttctggaaatatgtctttaagtattttagacattcctcgtcagtattaggaatttccatgggaaaagaggtttgcatgctggtaatgcaacctttgaaactttgtaaaggaaacatatatgtatatatttatgtatatgtaagtatgtgaatgtgcgcattttgcattccatatgaaaaaaatgccacgtctgtttaaattatttgatgtaggtttgggtttttgagatttgctggtgaagtcagtgacgaaaaataaaccttcccttatcttcctactctgcccctccccctaatgaaatcatattaagtngtttttcctnntttttttgtaatatacagctttttttttaaggcatcattttcgagggtctaaaattatctggtaaaacaaatgaaattaagtgatccaaagctgctgaagtatgtttgaactctccagtgccctatagctgcaagagttgaattagtcatgcagtcatatggcagcaggttggtgatt

SEQ ID NO: 100 - DNA, 2759 bp, Homo sapiens
gcggggcctccgtatccccacgtgggccctgcaggaactggcggggcgcgtgacccggcgaggcccagagacaggggaggggcgccgggagccgggcggatccgcgtccccgatgcgcgctgcatttccggcgggcggcgctgggggcagcgtggagccacccagtgctcggcccgccccgcaacccgccggaaccgccgcccgcagcgaggaagcgcccgcgcgggcgcaggcggccggaatggcggggcccggctggggtcccccgcgcctggacggcttcatcctcaccgagcgcctgggcagcggcacgtacgccacggtgtacaaggcctacgccaagaaggacactcgtgaagtggtagccataaagtgtgtagccaagaaaagtctgaacaaggcatcggtggagaacctcctcacggagattgagatcctcaagggcattcgacatccccacattgtgcagctgaaagactttcagtgggacagtgacaatatctacctcatcatggagttttgcgcagggggcgacctgtctcgcttcatccatacccgcaggattctgcctgagaaggtggcgcgtgtcttcatgcagcaattagctagcgccctgcaattcctgcatgaacggaatatctctcacctggatctgaagccacagaacattctactgagctccttggagaagccccacctaaaactggcagactttggtttcgcacaacacatgtccccgtgggatgagaagcacgtgctccgtggctcccccctctacatggcccccgagatggtgtgccagcggcagtatgacgcccgcgtggacctctggtccatgggggtcatcctgtatgaagccctcttcgggcagcccccctttgcctccaggtcgttctcggagctggaagagaagatccgtagcaaccgggtcatcgagctccccttgcggcccctgctctcccgagactgccgggacctactgcagcggctcctggagcgggaccccagccgtcgcatctccttccaggacttctttgcgcacccctgggtggacctggagcacatgcccagtggggagagtctggggcgagcaaccgccctggtggtgcaggctgtgaagaaagaccaggagggggattcagcagccgccttatcactctactgcaaggctctggacttctttgtacctgccctgcactatgaagtggatgcccagcggaaggaggcaattaaggcaaaggtggggcagtacgtgtcccgggctgaggagctcaaggccatcgtctcctcttccaatcaggccctgctgaggcaggggacctctgcccgagacctgctcagagagatggcccgggacaagccacgcctcctagctgccctggaagtggcttcagctgccatggccaaggaggaggccgccggcggggagcaggatgccctggacctgtaccagcacagcctgggggagctactgctgttgctgcggagcccccgggccggaggcgggagctgcttcacactgaggttcagaacctcatggcccgagctgaatacttgaaggagcagatgagggaatctcgctgggaagctgacaccctggacaaagagggactgtcggaatctgttcgtagctcttgcacccttcagtgaccctagaagaatgattggacagatgtgagccatctggagcagaggggcactaacccaggctgacgccaagaatgaagtggcccactgcagccctggcgagcaggcttcttggatggacagtgctgagacccccatatcccagagtccccagcctccctcaggttactctgcaccccacagatggtttgatggctgtgctgtatactggaggggagggcaggactctgggagaacagcacttctttcatgagacctttgttactcggtggttactgggtcctgtgcctgtccgttttggggcatgcagccctctatcatttttggctccgagaagagggcaaggggcccccgcagggtacttctgtgcttgccctcgccctgccagcaggcagctgtgcccctggcctgcccttcccgggaccccttattccaactcagctcctctttgcactggaatggggcactccaacacccctcagggaccaccctccccacagtatgcactcagccccacagaacccaccagtctttctgggaactcacacctgcccgccatcttggtactttaggttaatccctcaagcatgaaagctggatcttttggggtttaagaagcccaagccttgttcctgccctggcctagggagcactcaggagggttccttggtcctcatctctcccacctccgttccctctgggccccacactagccacagcgcgggccttgtgctggagtttgagcctgggacagggagagggaggcttggagacagtctgacccagtgccctctaggccacccacttctaggcctgccctgccgccgtggagccctgggcaagctctttcccctttctgggcctgggtctccccatctcttcaatggggctgataccttcacagcccacagcatgggcacttatgaggacaaagtgaatttaacctggaaaagaatgtatttgagagtttcttttaaataatcagcgggtgttggtgatttgtagcccttctgcccttaaatgcttccttgggcaagagctgtctgtcctccctgcaggaggctgagtgtgaagagtatcattcattgtttctctattaaattattttctct

SEQ ID NO: 101 - DNA, 1875 bp, Homo sapiens
tggacctgtcctgaggcagaggccgagatgcgcgcaaccgcgggagcagccaagtggactggactcttttcttgacttagctaccaggagctagagatgctgttattctatcgtatgtgagaagtcggcccagagatggaaaactttattctgtatgaggagatcggaagaggaagcaagactgttgtctataaagggcgacggaagggaacaatcaattttgtagccattctttgtactgataagtgcagaaggcctgaaataaccaactgggtccgtctcacccgtgaaataaaacacaagaatattgtaacttttcatgaatggtatgaaacaagcaaccacctctggctagtgatgaaaacctcccagaagatgttgtgagagaatttggaattgacctgattagtggattacatcatcttcataaacttggcattctcttttgtgacatttctcctaggaagatactcttggaagggcctggcacactgaagtttagcaacttttgcttggcaaaagtggaaggtgaaaatttggaagagttctttgctttggtggcagcagaggaaggaggaggtgataatggggaaaatgtcctgaagaaaagcatgaaaagtagagtcaaaggatctcctgtatatacagcaccagaagttgtgaggggtgctgacttttccatctccagtgacctctggtctttgggctgtctgctttatgaaatgttttcaggaaaacctccattcttctcagaaagtgtttcagaattaactgaaaagatcttatgtgaagatcctttgccacctattccgaaagattcttctcgtcctaaagcttcttcagattttattaatttgcttgatgggttacttcaaagagatcctcagaaaagattgacttggacaaggctactgcagcattcattttggaagaaagcttttgctggagcagatcaggaatcaagcgtcgaagatctcagtctcagcagaaacactatggagtgttctgggccacaagattccaaggagcttttgcagaactctcagagtagacaagcaaaagggcacaagagtggtcaaccactaggtcactctttcagactagaaaatccaactgagtttcggcctaagagtactcttgagggtcaattgaatgaatccatgtttcttctcagttctcgtcctactcccagaactagcactgcagtggaagtaagtcctggtgaggatatgactcactgttcaccacagaagacttctcctctgaccaagattacaagtggacacctgagtcagcaggacctggaatcccagatgagagagcttatctacacggactcagatcttgttgtcacccccattatcgacaatccaaagataatgaaacagccaccagttaaatttgatgcaaaaatattgcatctaccaacatattcagtggataagttattatttctgaaagatcaagattggaatgactttttgcaacaagtgtgctcgcagatcgactccactgagaagagcatgggggcctcccgagccaagctgaatctcctttgctatttgtgcgtggtggctggtcaccaggaggtggccaccaggctcctccattcccccctgttccaattgctaatccagcatttgcggatagctccaaactgggatatacgggccaaggttgctcacgtgattggtttactggcttcgcacacaactgagctccaggaaaatacacctgttgttgagactacaagctccattggaatcgggattttgaactgtcttgttcaacactccactccagtgcctagacagtgccttgtgtatgtatagatactgacaaatatttcaaaataaataaaactgtatcagcatt

SEQ ID NO: 102 - DNA, 117 bp, Homo sapiens
tctttggcccacgtgctgagggcgcggcagatcctgacggagccagaagtgcgcgactacctgcggggcctggtcagcggcctgcgctacctgcaccagcggtgcatcctgcaccgc

SEQ ID NO: 103 - DNA, 2721 bp, Murine sp.
ggtctgctgcatggataatggactggaacacagaaagaccatgcagggttcggctgtagaaggccagtatctccagaggccagaagacaccatcagatctcctgggactggagttatagaggttgtgagctgccatgttgaaccaagcaggtcactgagggacacaggcatgtggatggaaaccctgctgggagaaaaaagaaactgctgaagggactgacatgggacagcaacatggaaccaggaatggtctcacgcatagagagctcccccggggcgtggggctgctgctcgccatggcccttatgaacgtggcgctctacctctgccttgatcagcttttcatctcccctggacgatccaccgcggactctaggcgctgtcctccgggctacttcagaatggggcggatgagaaactgctcacgctggctgtcctgtgaagagctgaggacagaagtcaggcagctgaagcgcgttggggagggagccgtgaagagagtctttctgtctgaatggaaggaacacaaagtcgctctctcccggctcaccaggctggagatgaaggaggacttcctgcatgggctgcagatgctgaagtctctacagagtgagcacgtggtcacgctggtgggctactgtgaggaagatggcactattctcaccgaatatcaccccttaggttccttgagcaacctggaagaaacactaaacctttcaaagtaccaagacgtgaacacttggcagcacaggctgcagctggccatggagtacgtcagcatcattaactatctgcatcacagccccctgggcacgagggtcatgtgtgactctaacgacctgcccaaaacattgtcccagtacctgctaacaagtaacttcagcattgtggcaaacgacctggacgctctgcccctggtagaccatgactctggggtacttataaagtgtggccacagagagctccatggggattttgtggctccagagcagctgtggccctacggagaagacacgcccttccaagacgatctcatgccttcctacaatgagaaggttgacatctggaagattccagatgtctccagtttcctcttggggcacgtggaagggagtgatatggttagattccatttgtttgatatccataaggcgtgcaagagccagatcccggcagaaagacccactgctcagaacgtgctagacgcttaccagagggttttccattcactccgagacactgtgatgtcgcagacgaaagaaatgctgtaaaaatgagccatcgagtgacgtgcttgatggctgaatggcatcccagctgttccgctcttgatgatggaagagctttgcatggatggatgttgaccctggctgttcagccacgtaggcctcctctacgtctgcctgcatgtttgagtgttctgctctcctggcagcccggatggaagctgccaagcgagaaagcctggcttcaggatgctccctggtgaagatgcagaggattctggatctgcatagtttcaagggagtgatcaaacggtgaccttgaagacatgctgcctgccttggtaactttttatagactagtaggaaacagaaatcttttgggggagggggggacaacccactagttcctcagagacaatttcttctcattcagaaagccctgttggaagctggggatgttttaactccgtggcagggcacttgcctagttgtgtgcaaagccttggatctgacccatggcatgtgcacacacacaaatgctcaaagaaaatcccagacgccagaagtgtgcccctttcttgtcaataaggtcattgtcagtaccggagatgattttttttatgaagcgtttatgctgactcgtgtcactgagccaagtgtgcatggtcgttagctactttgtgggttcttctttctttctaccctacttcttccctttccaccccctaacactagataggagagaggagagagaaaggaaagtgggcactgttatattgttggacgacttcttgctgattaaggggtgtcgagttccttggagcaatgatctttgctgccaagatatctcatttcttcttgtttcttcttcgcccacgaccacttcacaaacaccgaccaacagcaaacaacaacccaccccgcttctcgggggccctagcacttatgtacttctgaaaagtccccagaaattccaatcatcacacactcagagaaactgtctgctgctggcaaaactacacccctgctagagcatgaggcaaatcatagtcagctgctgtggacagtctgaagcagcctggcatcccacacctgagattaaaacaaaaacattcttacctgtgttttgtttttgttttaagaaaccaaagtgcaccaagatagcatgctcttgagattgtggctgtctagagatttttggaacagcaagttgaaggaactttcttacctgccttgaatggtgctttgaacttcctgctgacctggagtttctgtgtgaatatttctatccagtgtccccctgtaccggaaagtacaaagtctgctctgggcttgcatgcctgaacactttaaaacactgtggagccaggaataatggtacccacctgtaatcccagcacctgggagacaggaggaaccaggagttcagggttatcctgggctatataccgtgaccctgtctacccccacaccccaataaaaaaacaaaaaggtc

SEQ ID NO: 104 - DNA, 2115 bp, Homo sapiens
gaggtggtggctgtgcagatgatggtggaatgcatggatgaccattacgccagtcaggccctggaggagctgatgccactgctgaagctgcggcacgcccacatctctgtgtaccaggagctgttcatcacgtggaatggggagatctcttctctgtacctctgcctggtgatggagttcaatgagctcagcttccaggaggtcattgaggataagaggaaggcaaagaaaatcattgactctgagtggatgcagaatgtgctgggccaggtgctggacgcgctggaatacctgcaccatttggacatcatccacaggaatctcaaaccctccaacatcatcctcatcagcagtgaccactgcaaactgcaggacctgagttccaatgtgctaatgacagacaaagccaaatggaatattcgtgcggaggaagacccctttcgtaagtcctggatggcccctgaagccctcaacttctccttcagccagaaatcagacatctggtccctgggctgcatcattctggacatgaccagctgctccttcatggatggcacagaagccatgcatctgcggaagtccctccgccagagcccaggcagcctgaaggccgtcctgaagacaatggaggagaagcagatcccggatgtggaaaccttcaggaatcttctgcccttgatgctccagatcgacccctcggatcgaataacgataaaggacgtggtgcacatcaccttcttgagaggctccttcaagtcctcgtgcgtctctctgaccctgcaccggcagatggtgcctgcgtccatcaccgacatgctgttagaaggcaacgtggccagcattttaggtgatgctggggacacaaagggggagcgtgccctgaagctcctgtccatggccttggcatcctattgtttagttccagagggttcattatttatgcccctggccttgctccacatgcacgaccagtggctcagctgtgaccaggacagagtccctgggaagagagactttgcctccctggggaaactagggaagctgttgggccccatcccaaagggtctgccgtggcccccggagctggtggaggtggtggtcacgaccatggagctacatgacagggtcctcgatgtccagctgtgtgcctgctccctgctgctgcacctcctgggccaagcgctggtgcaccacccggaagccaaggctccctgcaaccaagccatcacctccaccctgctgagtgctcttcagagccaccccgaggaggagccacttcttgtcatggtctacagcctgctagccatcaccacaacccaggagtcagagtcactgtcagaggagctgcagaacgctgggctgctggagcacatcctggagcacctcaacagctccctcgaaagcagggacgtctgcgccagcggcctgggcctgctctgggccctcctgctggacgaccccatcttggcactccagcgccccaggaaaaagagagctccaaaccacggaaagcccgggaaacccaagaaccctgccagcacccaaagtatcattgtgaacaaggcccccttggagaaggtcccggacctcatcagccaggtgttggccacctaccctgcggatggggaaatggcagaagccagctgcggagtcttctggctgctgtccctgctgggctgcatcaaggagcagcagtttgaacaagtggtggcgctgctcctgcaaagcatccggctgtgccaggacagagccctgctggtgaacaatgcctaccggggactggccagcctggtgaaggtgtcagagctggcggccttcaaggtggtggtgcaggaggagggcggcagtggcctcagcctcatcaaggagacctaccagctccacagggacgacccggaggtggtggagaacgtgggcatgctgctggtccacctggcttcctatgaggagatcctgccggagctggtgtccagtagtatgaaggccctgctccaggagatcaaggagcgcttcacctccagcctggtgagtgacagcagcgccttcagcaaaccaggcctccctccaggtggaagcccccagctggggtgcaccacgtctgggggactggaatag

SEQ ID NO: 105 - DNA, 1729 bp, Murine sp.
cagaagaagacccctgccagaagtcctggatggctcctgaagctctcaaattctccttctccaccaaatccgacatctggtctctgggctgcatcattctagacatggccacttgctccttcctgaacgacacagaagccatgcaactgcggaaggccatccgccatcatccaggcagcctgaagcccatcctgaaaaccatggaggagaagcaaatccctggtacagatgtctactatttgcttctgcccttcatgttgcatatcaacccctccgatcgactggcaatcaaggatgtgatgcaagtcaccttcatgagcaactccttcaaaagctcctctgttgcgctgaatatgcagcggcagaaggtccccatcttcatcactgacgtgctgcttgaaggcaacatggccaacatcttaggcagctggctgtgtgcttcctttgtgaacgacagcaggcactgtgactcagggattggctcgcagagacttgggtttgattttcagtcagtctcttggacagagcaccctctgaaagatgtcatgcagaatttctccagtcgaccagaggtccagctcagagccattaacaagttgttgacaatgccagaggaccagctagggctgccatggcccacagagctgctggaagaggtgatcagcatcataaagcagcatgggcggatcctggatattctgctcagcacctgctcccttctgctgcgtgttcttggccaagcactggcaaaggacccagaagctgagatcccaaggagcagtttgatcatctccttcctgatggataccttgcggagccatcctaactctgaaaggcttgttaatgtggtctacaacgtgcttgccattatttccagccaaggacagatctcagaagagctggaagaggaggggttgtttcagcttgcccaagagaacctggagcacttccaagaggacagggacatctgcctctctatcctgagcctgctctggtccctcctggtagatgttgtcactgtggacaaagagcccttggagcagctctctggcatggtcacctgggtgctggctactcatccggaggacgtggaaatagcagaggctggctgtgcggtgctctggctgctgtccttgttgggctgcataaaggagagtcagtttgagcaggtggtagtgctgctcctgagaagcatccagctgtgccctggcagagtactgctggtgaacaatgcattccgtggcttggccagcctcgcaaaggtgtccgaactggtggccttccgaatagtagtactggaagagggcagcagcggcctccacctcatccaagatatctacaagctctacaaggatgaccctgaggtggtggagaacctctgcatgctgttggcccatctgacctcctacaaggagatcctgccagagatggagtctggaggcatcaaagacctagtccaggtgatccgggggcgctttacctccagcctggagctgatttcttacgctgatgagatactccaggtactggaagcaaatgcacaacctggcctccaggaggatcagcttgagcctcctgcagggcaggaagccccactgcagggagagcccctcttcaggccctgacatgctgcccttctggtcctgtggtaagagaaagtatcactaggtccagtattaatttcgtaccccatggtgactaataaaagaagccctaggctgtttctggc

SEQ ID NO: 106 - DNA, 2461 bp, Homo sapiens
ggccggggtcggggcgcggggcatgcgcgcgggctgggcagggggccggcggggcgcagagcggagccgcctcggagcctgagccgcccggggccggggccggggagccgcgcggggccggccggccggggggaggggagcgatgcggcgccggcgggcggcagtggccgcgggtttctgcgcctccttcctgctgggctccgtcctcaacgtgctcttcgctccgggtcggagcctccgaggccaggccagtcccctgagccttcgccggccccgggtgcgggccgtcgcgggggccgcggggagctggcccggcagatccgggcgcgctacgaggaggtgcagcgctattcccgcgggggccccgggcccggggcgggccggccggagcggcggcgcctgatggacctggctccgggcgggcccggcctgccgcgcccccggcccccttgggcccggcccctgtccgacggcgccccaggctggcccccggctcccggcccaggctcccccggcccgggcccgcgcctgggctgcgccgcgcttcgcaacgtgtccggcgcgcagtacatgggctcaggctacaccaaggccgtgtaccgggtccgcctgcccggcggtgccgcggtggcgctcaaggcggtggactttagcggccacgatctgggcagctgcgtgcgcgagttcggggtacggaggggctgctatcggctggcggcccacaagctgcttaaggagatggtgctgctggagcggctgcggcaccccaacgtgctgcagctctatggctactgctaccaggacagcgaggacatcccagacaccctgaccaccatcacggagctgggcgcccctgtagaaatgatccagctgctgcaaacttcctgggaggatcgattccgaatctgcctgagcctgggccgcctcctccaccacctggcccactccccactgggctccgtcactctgctggacttccgccctcggcagtttgtgctggtggatggggagctcaaagtgacggacctggatgacgcacgtgtggaggagacgccgtgtgcaggcagcaccgactgcatactcgagtttccggccaggaacttcaccctgccctgctcagcccagggctggtgcgagggcatgaacgagaagcggaacctctataatgcctacaggtttttcttcacatacctcctgcctcacagtgccccgccttcactgcgtcctctgctggacagcatcgtcaacgccacaggagagctcgcctggggggtggacgagaccctggcccagctggagaaggtgctgcacctgtaccggagcgggcagtatctgcagaactccacggcaagcagcagtaccgagtaccagtgtatcccagacagcaccatcccccaggaagactaccgctgctggccatcctaccaccacgggagctgcctcctttcagtgttcaacctggctgaggctgtggatgtctgtgagagccatgcccagtgtcgggcctttgtggtcaccaaccagaccacctggacaggtcggcagctggtctttttcaagactggatggagccaagtggtccctgatcccaacaagaccacatatgtgaaggcctctggctgacctatctgagggctcggctgaccagctgactatcctcagcagctgggcttgcctgtggagggagtgacttgcactggcagcactgcatgtcacctgggaacccctgcagacaaagctaacatcccagacagacagatgtgaccaggacaaacgtgcaataatgccaaatgttaaaatgtgagtttaccagcctagctatgggactgctggctcctagtccaggaatcatgggggtatgactgcctctccaaccctgtgggctgtaagcaagctcaggctagtctccccactgggggctgtgcccctccctgggacggttccgtgggcagccccatcactgtgttcaatagtgtgagaatgtagctaaagcccctgctgctgctgctgcacatgccacagcaggcggtgggggctgcgtggggacaatccatcgtggagtgttctctcagcttaggtctggacaggagacttggcgggagatgctccaggatgtgggtgattctgtacctggggaggctatctctgacctcccgacaggggacactcccaggccagcccaggggtcaggggcagaggtgcacacctcagcatgagccaagactggggtcagggagcaggtgtggtttgagccaggacctggggcgggggtggggccggggcctttctgcctcatttgctttcaatgaaagcctcaaagcagccaaaaccaggctttcccccttcctcgagtttgaatatccagaatcttttgtacttcttgttggttaaattgtttatttttgtaaaaaataaaataaaattagttaataaaatgatgtttcacagcaaactcttccct

SEQ ID NO: 107 - DNA, 1886 bp, Murine sp.
ccacgcgtccgggctgcgccgcgctccgcaacgtgtctggcgcgcagtacgtgggctcaggctacactaaggctgtgtaccgggtccgcctgcccggcggcgccgcggtggcgcttaaagcagtggacttcagcggccacgatctgggcagctgcgtgcgcgagttcggggcgcgaaggggctgctatcgcctggcggcccacaagctgctcaaagagatggtgctgctggagcggctgcggcaccccaacgtgctgcagctctatggctattgctaccaggacagtgagggcatcccagacacgctgaccaccatcacagagctgggtgcccctgtggagatgatccagctgttgcagacttcctgggaggatcgattccgaatctgcctcagccttggccgcctcctccaccacctggcccactccccgctgggctcggtcaccctgcttgacttccgccctcggcagtttgtgctagtgaacggggagctgaaagtgacagacctggatgatgcccgcgtggaagagacaccgtgcaccagcagtgccgactgcacgctagagtttccagccaggaacttcagcctgccctgctcggcccagggctggtgcgagggcatgaatgagaaacggaacctctacaatgcctacaggttcttcttcacatacctcctgccacacagtgccccgccttccctccgacctctcctggatagcatcgtcaatgccacgggagagctcgcctggggggtggatgagaccctggcccagctggagacagcgctacacttgttccgaagtgggcagtacctgcagaactctacaagcagcagggctgagtaccagcgcatcccggacagtgccatcacacaggaggactatcgctgctggccatcctatcaccacggcggctgcctcctgtccgtgttcaacctggctgaggctatagatgtctgtgagagccatgctcagtgtcgtgcctttgtggtcaccaaccagaccacctggacaggtcggaagctggtcttttttaagactggatggaaccaagtggtccctgatgccggcaagaccacatatgtgaaggcccctggttgactggttgtgggctcagctgaccagctgggcttgcctgctgcaggcgtgacttgcatcccacctgggaacccctgcagacaaaagctagctcccagagcaactgatgtgaccaggacaaaacgtgcaatatgcaaaaatgttaaaatgtgagtttgccagcttcagtcccagactggttggaacccgattgcctctctggagctgtaggctgtgagcagggctcaggctggtcttaactgggacagtcccgtgggcagcccattactgcattcatgctttgagaatgtagccagaacactgctgctgcataagccaccgtgggcaggagctgcctggggacaaccagtctcagagtgctctctcagctcagctccgctccaaatggagagcgcgggatgcggagatgtgagtgaaccagcactgggaagaaggctctcgggcctctccctagaggttgctcctaggccagccccgaggccgtgggcagcagtgctcgcatccatatgagccaagactagagtggaggagcagattgcatttgagccaggactggggtgggggtagggtcggggcctctctgcctcatttgctttcagtgaaagccagggagcagccgcagccaggctcctcccactcctggaggccaggctcctccccctcctggaggccaggctcctccccctcctggagtttgcgtacccagaagcttttatacttctcgttcattaaattgtttatttttgtaaaaaaaaaaattaatcaattaataaaatgatgttttgtgac

SEQ ID NO: 108 - DNA, 1425 bp, Homo sapiens
atgatctccttctgtccagactgtggcaaaagtatccaagcggcattcaaattctgcccctactgtggaaattctttgcctgtagaggagcatgtagggtcccagacctttgtcaatccacatgtgtcatccttccaaggctcaaagagagggctgaactccagttttgaaacctctcctaagaaagtgaaatggtccagcaccgtcacctctccccgattatccctcttctcagatggtgacagttctgagtctgaagatactctgagttcctctgagagatccaaaggctccgggagcagacccccaacccccaaaagcagccctcagaagaccaggaagagccctcaggtgaccaggggtagccctcagaagaccagctgtagccctcagaagaccaggcagagccctcagacgctgaagcggagccgagtgaccacctcacttgaagctttgcccacagggacagtgctgacagacaagagtgggcgacagtggaagctgaagtccttccagaccagggacaaccagggcattctctatgaagctgcacccacctccaccctcacctgtgactcaggaccacagaagcaaaagttctcactcaaactggatgccaaggatgggcgcttgttcaatgagcagaacttcttccagcgggccgccaagcctctgcaagtcaacaagtggaagaagctgtactcgaccccactgctggccatccctacctgcatgggtttcggtgttcaccaggacaaatacaggttcttggtgttacccagcctggggaggagccttcagtcggccctggatgtcagcccaaagcatgtgctgtcagagaggtctgtgctgcaggtggcctgccggctgctggatgccctggagttcctccatgagaatgagtatgttcatggaaatgtgacagctgaaaatatctttgtggatccagaggaccagagtcaggtgactttggcaggctatggcttcgccttccgctattgcccaagtggcaaacacgtggcctacgtggaaggcagcaggagccctcacgagggggaccttgagttcattagcatggacctgcacaagggatgcgggccctcccgccgcagcgacctccagagcctgggctactgcatgctgaagtggctctacgggtttctgccatggacaaattgccttcccaacactgaggacatcatgaagcaaaaacagaagtttgttgataagccggggcccttcgtgggaccctgcggtcactggatcaggccctcagagaccctgcagaagtacctgaaggtggtgatggccctcacgtatgaggagaagccgccctacgccatgctgaggaacaacctagaagctttgctgcaggatctgcgtgtgtctccatatgaccccattggcctcccgatggtgccctag

SEQ ID NO: 109 - DNA, 1009 bp, Murine sp.
ccatccccacctgtatcggctttggcattcaccaggacaagtacaggttcctagtattccccagcctggggaggagccttcagtcagccctggatgacaacccaaagcatgtggtatcagagagatgtgtgcttcaggtggcctgcaggctgctggatgctctggagtatctccatgaaaatgagtatgttcacgggaacctgacagctgagaatgtctttgtgaatccagaggatctgagccaggtgaccctggtgggctatggcttcacctaccgatactgcccaggtggcaaacacgtggcctacaaagaaggcagcaggagtccacacgatggggacttggagttcattagcatggacctgcacaagggatgcggaccctcccgccgcagcgatctccagaccttgggctactgtatgctcaagtggctttatgggtccctgccatggacaaattgccttcccaacaccgaaaagataactaggcagaagcagaagtatctggacagccccgagcgcctcgtgggactgtgtggccgctggaacaaggcctcagagaccctgcgggagtacctgaaggtggtgatggccctcaattatgaggagaagccaccctatgccacgctgaggaacagcctagaagctctgctgcaggatatgcgggtgtcaccctatgaccctctggacctccagatggtgccttagatggaatccagagcttccgacttgcagcttgaagtagaacatgaagtagtgtgactggaggcctgtttgaactcatagctcctaaaagaatcccttgaatgtgcattctcaccgctcccttaggacatatgaatcagcacttgtgttggggaacctgagtcatgtcatgtaatgtgaaactcctccctgtctcagctctggcagctgtggatggaggtaagtggatgctggcggcggcggcggcagcagccactccactccctatggcatttctgtgatggcataataaactgtttttaatc

SEQ ID NO: 110 - DNA, 918 bp, Homo sapiens
atgggccacgcgctgtgtgtctgctctcggggaactgtcatcattgacaataagcgctacctcttcatccagaaactgggggagggtgggttcagctatgtggacctagtggaagggttacatgatggacacttctacgccctgaagcgaatcctgtgtcacgagcagcaggaccgggaggaggcccagcgagaagccgacatgcatcgcctcttcaatcaccccaacatccttcgcctcgtggcttactgtctgagggaacggggtgctaagcatgaggcctggctgctgctaccattcttcaagagaggtacgctgtggaatgagatagaaaggctgaaggacaaaggcaacttcctgaccgaggatcaaatcctttggctgctgctggggatctgcagaggccttgaggccattcatgccaagggttatgcccacagagacttgaagcccaccaatatattgcttggagatgaggggcagccagttttaatggacttgggttccatgaatcaagcatgcatccatgtggagggctcccgccaggctctgaccctgcaggactgggcagcccagcggtgcaccatctcctaccgagccccagagctcttctctgtgcagagtcactgtgtcatcgatgagcggactgatgtctggtccctaggctgcgtgctatatgccatgatgtttggggaaggcccttatgacatggtgttccaaaagggtgacagtgtggcccttgctgtgcagaaccaactcagcatcccacaaagccccaggcattcttcagcattgcggcagctcctgaactcgatgatgaccgtggacccgcatcagcgtcctcacattcctctcctcctcagtcagctggaggcgctgcagcccccagctcctggccaacatactacccaaatctga

SEQ ID NO: 111 - DNA, 2668 bp, Homo sapiens
ccctgaggcaccgccccaagtttggtgtgaccggcgggggacgccggtggtggcggcagcgacggctgcgggggcaccgggccgcggcgccaccatggcggtgcgacaggcgctgggccgcggcctgcagctgggtcgagcgctgctgctgcgcttcacgggcaagcccggccgggcctacggcttggggcggccgggcccggcggcgggctgtgtccgcggggagcgtccaggctgggccgcaggaccgggcgcggagcctcgcagggtcgggctcgggctccctaaccgtctccgcttcttccgccagtcggtggccgggctggcggcgcggttgcagcggcagttcgtggtgcgggcctggggctgcgcgggcccttgcggccgggcagtctttctggccttcgggctagggctgggcctcatcgaggaaaaacaggcggagagccggcgggcggtctcggcctgtcaggagatccaggcaatttttacccagaaaagcaagccggggcctgacccgttggacacgagacgcttgcagggctttcggctggaggagtatctgatagggcagtccattggtaagggctgcagtgctgctgtgtatgaagccaccatgcctacattgccccagaacctggaggtgacaaagagcaccgggttgcttccagggagaggcccaggtaccagtgcaccaggagaagggcaggagcgagctccgggggcccctgccttccccttggccatcaagatgatgtggaacatctcggcaggttcctccagcgaagccatcttgaacacaatgagccaggagctggtcccagcgagccgagtggccttggctggggagtatggagcagtcacttacagaaaatccaagagaggtcccaagcaactagcccctcaccccaacatcatccgggttctccgcgccttcacctcttccgtgccgctgctgccaggggccctggtcgactaccctgatgtgctgccctcacgcctccaccctgaaggcctgggccatggccggacgctgttcctcgttatgaagaactatccctgtaccctgcgccagtacctttgtgtgaacacacccagcccccgcctcgccgccatgatgctgctgcagctgctggaaggcgtggaccatctggttcaacagggcatcgcgcacagagacctgaaatccgacaacatccttgtggagctggacccagacggctgcccctggctggtgatcgcagattttggctgctgcctggctgatgagagcatcggcctgcagttgcccttcagcagctggtacgtggatcggggcggaaacggctgtctgatggccccagaggtgtccacggcccgtcctggccccagggcagtgattgactacagcaaggctgatgcctgggcagtgggagccatcgcctatgaaatcttcgggcttgtcaatcccttctacggccagggcaaggcccaccttgaaagccgcagctaccaagaggctcagctacctgcactgcccgagtcagtgcctccagacgtgagacagttggtgagggcactgctccagcgagaggccagcaagagaccatctgcccgagtagccgcaaatgtgcttcatctaagcctctggggtgaacatattctagccctgaagaatctgaagttagacaagatggttggctggctcctccaacaatcggccgccactttgttggccaacaggctcacagagaagtgttgtgtggaaacaaaaatgaagatgctctttctggctaacctggagtgtgaaacgctctgccaggcagccctcctcctctgctcatggagggcagccctgtgatgtccctgcatggagctggtgaattactaaaagaacatggcatcctctgtgtcgtgatggtctgtgaatggtgagggtgggagtcaggagacaagacagcgcagagagggctggttagccggaaaaggcctcgggcttggcaaatggaagaacttgagtgagagttcagtctgcagtcctctgctcacagacatctgaaaagtgaatggccaagctggtctagtagatgaggctggactgaggaggggtaggcctgcatccacagagaggatccaggccaaggcactggctgtcagtggcagagtttggctgtgacctttgcccctaacacgaggaactcgtttgaagggggcagcgtagcatgtctgatttgccacctggatgaaggcagacatcaacatgggtcagcacgttcagttacgggagtgggaaattacatgaggcctgggcctctgcgttcccaagctgtgcgttctggaccagctactgaattattaatctcacttagcgaaagtgacggatgagcagtaagtaagtaagtgtggggatttaaacttgagggtttccctcctgactagcctctcttacaggaattgtgaaatattaaatgcaaatttacaactgcagatgacgtatgtgccttgaactgaatatttggctttaagaatgattcttcttatactctgaaggtgagaatattttgtgggcaggtatcaacattggggaagagatttcatgtctaactaactaactttatacatgatttttaggaagctattgcctaaatcagcgtcaacatgcagtaaaggttgtcttcaactgacaaaa

SEQ ID NO: 112 - DNA, 2461 bp, Homo sapiens
aatgagatggagaagtacgagcggatccgagtggtggggagaggtgccttcgggattgtgcacctgtgcctgcgaaaggctgaccagaagctggtgatcatcaagcagattccagtggaacagatgaccaaggaagagcggcaggcagcccagaatgagtgccaggtcctcaagctgctcaaccaccccaatgtcattgagtactacgagaacttcctggaagacaaagcccttatgatcgccatggaatatgcaccaggcggcactctggctgagttcatccaaaagcgctgtaattccctgctggaggaggagaccatcctgcacttcttcgtgcagatcctgcttgcactgcatcatgtgcacacccacctcatcctgcaccgagacctcaagacccagaacatcctgcttgacaaacaccgcatggtcgtcaagatcggtgatttcggcatctccaagatccttagcagcaagagcaccccatgctatatctcccctgagctgtgtgagggcaagccctacaaccagaagagtgacatctgggccctgggctgtgtcctctacgagctggccagcctcaagagggctttcgaggctgcgaacttgccagcactggtgctgaagatcatgagtggcacctttgcacctatctctgaccggtacagccctgagcttcgccagctggtcctgagtctactcagcctggagcctgcccagcggccaccactcagccacatcatggcacagcccctctgcatccgtgccctcctcaacctccacaccgacggcagagaagtccgtggcccccagcaacacagggagcaggaccaccagtgtccgctgcagagaggcatcatcatgacattcggcagcggcagcaatgggtgcctaggccatggcagcctcactgacatcagccagcccaccattgtggaggctttgttgggctatgaaatggtgcagcaagtggaggaggccctgagcttcacactactaggctctgcacccctggaccaggagcctctgctgagtatagacctgggcactgctcactcagctgctgtgactggtgaggaggacttgggctctggagatgtaaacaggttacccagctgggagagaggacatctgctggctggtgtggcgtccagcactgatgtgtctaccttctctgaaggtgactgcaaggagcctgacaagtgctgctggagacacaagcagtgcactgggcacatcatctaccctttcgcctctgactgtgtccgccacagcctgcacctacactctgtcaaccactgcaactgtaattctaggctgaaggactcttcagaggatagcagcagctcccggggcgcgggcccaacctgctcccatgtcatcgagtccccttgctttgagctcacaccggaggaggagcatgtggagcgattccggtatggctggtgcaaaagctacagacctgtctctgtggcagtgatccaccatccactctaccatgagtgtggggcagatgatctaaatgaagaagaggaagaggaggaggaggaaaagcaagccccccatcccgacacaggtggggcccgccaccgcctcccctgacctaggcaccagcatggccactggtacccctgactccacagcgcccatcaccatctggcgctctgagagccccacagggaagggtcagggcagcaaggtgatcaagaaggtaaagaagaaaaaggaaaaagagaaagacaaggaggagatggatgagaaggcaaagctgaagaaaaaagccaagaaaggccagttgactaagaagaaaagcccggttaaattggagccttccccgccagacgtgagccgatcattaagcgcaagacagctggccaggatgtccgagtccagcccagaaagccgggaagagctggagagcgaggacagttacaatggccgggggcagggagaactgtccagcgaggatattgtggaatcatcatcgcccaggaagagagagaacacagtccaggccaaaaagacaggggcaaagccctcacaagccaggaaggtaaacaagagaaaatctcccccaggatcaaaccccaacctcagttgaggccagggtggtcagggtgcagaataaatgccatcgagcctgtggctggccctctgctgctgttctctccctccaacctggctgtttcttgcggggcaaggggtgggctcagggctgcaggggtttctcaaaggcaatccagctttcacaaaggaagcccatgggaaggcaggtgggagggaaaggaaggggcacagccctatttcttcctacctgctaggacaaggtggaagagtgtatctggggtgggaaggagggcttcccctctctgctgcgagagactggtctgtgtgaaatccacttctgggacaggcagtactgtctgcagcgatacccccaataaacggaactttttaaccc

SEQ ID NO: 113 - DNA, 2511 bp, Homo sapiens
atgtcggtgctgggcgagtacgagcgacactgcgattccatcaactcggactttgggagcgagtccgggggttgcggggactcgagtccggggcctagcgccagtcaggggccgcgagccggcggcggcgcggcggagcaggaggaactgcactacatccccatccgcgtcctgggccgcggcgccttcggggaagccacgctgtaccgccgcaccgaggatgactcactggttgtgtggaaggaagtcgatttgacccggctgtctgagaaggaacgtcgtgatgccttgaatgagatagttattctggcactgctgcagcacgacaacattattgcctactacaatcacttcatggacaataccacgctgctgattgagctggaatattgtaatggagggaacctgtatgacaaaatccttcgtcagaaggacaagttgtttgaggaagagatggtggtgtggtacctatttcagattgtttcagcagtgagctgcatccataaagctggaatccttcatagagatataaagacattaaatatttttctgaccaaggcaaacctgataaaacttggagattatggcctagcaaagaaacttaattctgagtattccatggctgagacgcttgtgggaaccccatattacatgtctccagagctctgtcaaggagtaaagtacaatttcaagtctgatatctgggcagttggctgcgtcatttttgaactgcttaccttaaagaggacgtttgatgctacaaacccacttaacctgtgtgtgaagatcgtgcaaggaattcgggccatggaagttgactctagccagtactctttggaattgatccaaatggttcattcgtgccttgaccaggatcctgagcagagacctactgcagatgaacttctagatcgccctcttctcaggaaacgcaggaggtcaagcactgtgactgaagcacccattgctgtagtaacatcacgaaccagtgaagtctatgtttggggtggtggaaaatccaccccccagaaactggatgttatcaagagtggctgtagtgcccggcaggtctgtgcagggaatacccactttgctgtggtcacagtggagaaggaactgtacacttgggtgaacatgcaaggaggcactaaactccatggtcagctgggccatggagacaaagcctcctatcgacagccaaagcatgtggaaaagttgcaaggcaaagctatccgtcaggtgtcatgtggtgatgatttcactgtctgtgtgactgatgagggtcagctctatgccttcggatcagattattatggctgcatgggggtggacaaagttgctggccctgaagtgctagaacccatgcagctgaacttcttcctcagcaatccagtggagcaggtctcctgtggagataatcatgtggtggttctgacacgaaacaaggaagtctattcttggggctgtggcgaatatggacgactgggtttggattcagaagaggattattatacaccacaaaaggtggatgttcccaaggccttgattattgttgcagttcaatgtggctgtgatgggacatttctgttgacccagtcaggcaaagtgctggcctgtggactcaatgaattcaataagctgggtctgaatcagtgcatgtcgggaattatcaaccatgaagcataccatgaagttccctacacaacgtcctttaccttggccaaacagttgtccttttataagatccgtaccattgccccaggcaagactcacacagctgctattgatgagcgaggccggctgctgacctttggctgcaacaagtgtgggcagctgggcgttgggaactacaagaagcgtctgggaatcaacctgttggggggaccccttggtgggaagcaagtgatcagggtctcctgcggtgatgagtttaccattgctgccactgatgagaaagtattgaattctaagaccatccgttccaatagcagtggcttatccattggaactgtgtttcagagctctagcccgggaggaggcggcgggggcggcggtggtgaagaagaggacagtcagcaggaatctgaaactcctgacccaagtggaggcttccgaggaacaatggaagcagaccgaggaatggaaggtttaatcagtcccacagaggccatggggaacagtaatggggccagcagctcctgtcctggctggcttcgaaaggagctggaaaatgcagaatttatccccatgcctgacagcccatctcctctcagtgcagcgttttcagaatctgagaaagataccctgccctatgaagagctgcaaggactcaaagtggcctctgaagctcctttggaacacaaaccccaagtagaagcctcggtaactgagctttttgcctttgaatcacaactagtcacctcggctgaatcctgcagtaacctgtgctgggaagggaacaccactgactcctcctgcgtgtgcgtgcagctctctgcaggtggaggttga

SEQ ID NO: 114 - DNA, 3036 bp, Homo sapiens
atgaacttgctgctctcctaccgcgatgtgcaggactactcggccatcattgagctggtggagacgctgcaggccttgcccacctgtgatgtggccgagcagcataatgtctgcttccactacacttttgccctcaaccggaggaacaggcctggggaccgggcgaaggccctgtctgtgctgctgccgctggtacagcttgagggctctgtggcgcccgatctgtactgcatgtgtggccgtatctacaaggacatgttcttcagctcgggtttccaggatgctgggcaccgggagcaggcctatcactggtatcgcaaggcttttgacgtagagcccagccttcactcaggcatcaatgcagctgtgctcctcattgctgccgggcagcactttgaggattccaaagagctccggctaataggcatgaagctgggctgcctgctggcccgcaaaggctgcgtggagaagatgcagtattactgggatgtgggtttctacctgggagcccagatcctcgccaatgaccccacccaggtggtgctggctgcagagcagctgtataagctcaatgcccccatatggtacctggtgtccgtgatggagaccttcctgctctaccagcacttcaggcccacgccagagccccctggagggccaccacgccgtgcccacttctggctccacttcttgctacagtcctgccaaccattcaagacagcctgtgcccagggcgaccagtgcttggtgctggtcctggagatgaacaaggtgctgctgcctgcaaagctcgaggttcggggtactgacccagtaagcacagtgaccctgagcctgctggagcctgagacccaggacattccctccagctggaccttcccagtcgcctccatatgcggagtcagcgcctcaaagcgcgacgagcgctgctgcttcctctatgcactccccccggctcaggacgtccagctgtgcttccccagcgtagggcactgccagtggttctgcggcctgatccaggcctgggtgacgaacccggattccacggcgcccgcggaggaggcggagggcgcgggggagatgttggagtttgattatgagtacacggagacgggcgagcggctggtgctgggcaagggcacgtatggggtggtgtacgcgggccgcgatcgccacacgagggtgcgcatcgccatcaaggagatcccggagcgggacagcaggttctctcagcccctgcatgaagagatcgctcttcacagacgcctgcgccacaagaacatagtgcgctatctgggctcagctagccagggcggctaccttaagatcttcatggaggaagtgcctggaggcagcctgtcctccttgctgcggtcggtgtggggacccctgaaggacaacgagagcaccatcagtttctacacccgccagatcctgcagggacttggctacttgcacgacaaccacatcgtgcacagggacataaaaggggacaatgtgctgatcaacaccttcagtgggctgctcaagatttctgacttcggcacctccaagcggctggcaggcatcacaccttgcactgagaccttcacaggaactctgcagtatatggccccagaaatcattgaccagggcccacgcgggtatgggaaagcagctgacatctggtcactgggctgcactgtcattgagatggccacaggtcgcccccccttccacgagctcgggagcccacaggctgccatgtttcaggtgggtatgtacaaggtccatccgccaatgcccagctctctgtcggccgaggcccaagcctttctcctccgaacttttgagccagacccccgcctccgagccagcgcccagacactgctgggggaccccttcctgcagcctgggaaaaggagccgcagccccagctccccacgacatgctccacggccctcagatgccccttctgccagtcccactccttcagccaactcaaccacccagtctcagacattcccgtgccctcaggcaccctctcagcacccacccagccccccgaagcgctgcctcagttatgggggcaccagccagctccgggtgcccgaggagcctgcggccgaggagcctgcgtctccggaggagagttcggggctgagcctgctgcaccaggagagcaagcgtcgggccatgctggccgcagtattggagcaggagctgccagcgctggcggagaatctgcaccaggagcagaagcaagagcagggggcccgtctgggcagaaaccatgtggaagagctgctgcgctgcctcggggcacacatccacactcccaaccgccggcagctcgcccaggagctgcgggcgctgcaaggacggctgagggcccagggccttgggcctgcgcttctgcacagaccgctgtttgccttcccggatgcggtgaagcagatcctccgcaagcgccagatccgtccacactggatgttcgttctggactcactgctcagccgtgctgtgcgggcagccctgggtgtgctaggaccggaggtggagaaggaggcggtctcaccgaggtcagaggagctgagtaatgaaggggactcccagcagagcccaggccagcagagcccgcttccggtggagcccgagcagggccccgctcctctgatggtgcagctgagcctcttgagggcagagactgatcggctgcgcgaaatcctggcggggaaggaacgggagtaccaggccctggtgcagcgggctctacagcggctgaatgaggaagcccggacctatgtcctggccccagagcctccaactgctctttcaacggaccagggcctggtgcagtggctacaggaactgaatgtggattcaggcaccatccaaatgctgttgaaccatagcttcaccctccacactctgctcacctatgccactcgagatgacctcatctacacccgcatcaggggagggatggtatgccgcatctggagggccatcttggcacagcgagcaggatccacaccagtcacctctggaccctga

SEQ ID NO: 115 - DNA, 2160 bp, Homo sapiens
atgtttgggaagaaaaagaaaaagattgaaatatctggcccgtccaactttgaacacagggttcatactgggtttgatccacaagagcagaagtttaccggccttccccagcagtggcacagcctgttagcagatacggccaacaggccaaagcctatggtggacccttcatgcatcacacccatccagctggctcctatgaagacaatcgttagaggaaacaaaccctgcaaggaaacctccatcaacggcctgctagaggattttgacaacatctcggtgactcgctccaactccctaaggaaagaaagcccacccaccccagatcagggagcctccagccacggtccaggccacgcggaagaaaatggcttcatcaccttctcccagtattccagcgaatccgatactactgctgactacacgaccgaaaagtacagggagaagagtctctatggagatgatctggatccgtattatagaggcagccacgcagccaagcaaaatgggcacgtaatgaaaatgaagcacggggaggcctactattctgaggtgaagcctttgaaatccgattttgccagattttctgccgattatcactcacatttggactcactgagcaaaccaagtgaatacagtgacctcaagtgggagtatcagagagcctcgagtagctcccctctggattattcattccaattcacaccttctagaactgcagggaccagcgggtgctccaaggagagcctggcgtacagtgaaagtgaatggggacccagcctggatgactatgacaggaggccaaagtcttcgtacctgaatcagacaagccctcagcccaccatgcggcagaggtccaggtcaggctcgggactccaggaaccgatgatgccatttggagcaagtgcatttaaaacccatccccaaggacactcctacaactcctacacctaccctcgcttgtccgagcccacaatgtgcattccaaaggtggattacgatcgagcacagatggtcctcagccctccactgtcagggtctgacacctaccccaggggccctgccaaactacctcaaagtcaaagcaaatcgggctattcctcaagcagtcaccagtacccgtctgggtaccacaaagccaccttgtaccatcacccctccctgcagagcagttcgcagtacatctccacggcttcctacctgagctccctcagcctctcatccagcacctacccgccgcccagctggggctcctcctccgaccagcagccctccagggtgtcccatgaacagtttcgggcggccctgcagctggtggtcagcccaggagaccccagggaatacttggccaactttatcaaaatcggggaaggctcaaccggcatcgtatgcatcgccaccgagaaacacacagggaaacaagttgcagtgaagaaaatggacctccggaagcaacagagacgagaactgcttttcaatgaggtcgtgatcatgcgggattaccaccatgacaatgtggttgacatgtacagcagctaccttgtcggcgatgagctctgggtggtcatggagtttctagaaggtggtgccttgacagacattgtgactcacaccagaatgaatgaagaacagatagctactgtctgcctgtcagttctgagagctctctcctaccttcataaccaaggagtgattcacagggacataaaaagtgactccatcctcctgacaagcgatggccggataaagttgtctgattttggtttctgtgctcaagtttccaaagaggtgccgaagaggaaatcattggttggcactccctactggatggcccctgaggtgatttctaggctaccttatgggacagaggtggacatctggtccctcgggatcatggtgatagaaatgattgatggcgagcccccctacttcaatgagcctcccctccaggcgatgcggaggatccgggacagtttacctccaagagtgaaggacctacacaaggtttcttcagtgctccggggattcctagacttgatgttggtgagggagccctctcagagagcaacagcccaggaactcctcggacatccattcttaaaactagcaggtccaccgtcttgcatcgtccccctcatgagacaatacaggcatcactga

SEQ ID NO: 116 - DNA, 2460 bp, Homo sapiens
atgaatgataggaatgagattcaaatggaagccaaactccaaagtcttaccattatagcacaggaaattctatgcagattctttattacccttaggagacatgcacgtttcctgctcactaaactaggaaggcaaggaatggcaaggtcaggaattactcacagctgtgctgtgtgcattctctgtgggcctagcagggaaggggacagccctgtggcaatgggcatgacacggatgctcctggaatgcagtctcagtgacaagttgtgtgtcatccaggagaagcagtatgaagtgattatcgtcccaactttgttggttactatcttcctcatccttcttggggtcatcctgtggctttttatcagagaacaaagaactcaacagcagcgttctggacctcaaggcattgcccctgttcctccacctagggacctaagctgggaagcaggacatggaggaaatgtggctttgccacttaaggagacatccgtggaaaactttctgggagctaccacacctgccctggctaagctgcaggtgccgcgggagcaactctctgaagttctggagcagatttgcagtggtagctgtgggcccatctttcgagccaatatgaacactggggacccttctaagcccaagagtgttattctcaaggctttaaaagaaccagctgggctccatgaggtacaagatttcttagggcgaatccaattccatcaatacctggggaaacacaaaaacctggtgcagctggaaggctgctgcactgaaaagctgccactctatatggtgttggaggatgtggcccagggggacctgctcggctttctctggacctgtcggcgggatgtgatgactatggatggtcttctctatgatctcacagaaaaacaagtatatcacatcggaaagcaagtccttttggcgctggaattcctgcaggagaagcatttgttccatggggatgtggcagccaggaatattctgatgcaaagtgatctcactgctaagctctgtggattaggcctggcttatgaagtttacacccgaggggccatctcctctactcaaaccatacctctcaagtggcttgccccagaacggcttctcctgagacctgctagcatcagagcagatgtctggtcttttgggatcctgctctatgagatggtgactctaggagcaccaccgtatcctgaagtccctcctaccagcatcctagagcatctccaaagaaggaaaatcatgaagagacccagtagctgcacacataccatgtacagtatcatgaagtcctgctggcgctggcgtgaggctgaccgcccctcacctagagagctgcgcttgcgcctagaagctgccattaaaactgcagatgacgaggctgtgttacaagtaccagagttggtggtacctgaactgtatgcagctgtggccggcatcagagtggagagcctcttctacaactatagcatgctttgaagagtctcgggcaagaaacattcatgcatgagtatatgttcttggaatcaattcctctaagaacagagaatggtctttcccagggacacaaagggagaaatgggacatggattcttgatcttcctttacacatttctcgggaaatctgaaatgatgctggatgggactctacacatcctgagctaagacatactgtcagtctcacttctgctgtcccagtcctagaaatcctgggtagaagtggtggacctgtgcaaaggaggttttagaactctgcagtatttgttggggcatggcacaaataagctcatccctcccgtccgaggctagtttcctctggaaccacatttttatctagatgaaaatttggaatgaaatgaaggaatagaaatccaataaaagagttgaagggaaagaaaatttaaggttcttcttgctcaggattacagatatggaccaacacctccttcaagaaaaggtggtaggacacaaagttcttcagtcctgagccctacatgtggggctggaggagaactataacggaaaaacctctgagtttcaccttaggtatagataaaagaaagatggtccccttttatctgattctgagacaggtaaattctgtttgttactacgtttaattagaaggtggaggagtcatttcatgattaagaacattcaacatgtattgttcattaagctagcttcctagttccgattagactaaggagactaagcctagagagtcaatgttagaacagtgaaaagaattctgtgtgtgtgtgtgtgtgtgtgtgtgtgtgcacaataaataggaaatgtagaaaccaagcaagaaggcttagtagctcagtctttaacaagggctagaaaagaatgtaatctgatatggaaggatagcagcttctaattttcaatcatctgttgatatactgtgaaacttattttattaaattaatatttattaaatgg

SEQ ID NO: 117 - DNA, 1793 bp, Murine sp.
ctgcaggagaagcacctgtttcatggggatgtggctgccaggaacatcctgatccaaagtgacctgactcccaaactttgtcatctgggcctggcttatgaagttcatgcccatggggccatctcctctgctcgatccagcaccatccctctcaagtggcttgctccagaaaggcttctcctgagacctgcaagcatcaggggagatatttggtcctttgggatcctgctttatgagatggtgactctaggagcaccaccataccctgaagtccctcccaccagcatcctacaatatcttcagagaaagaaaatcatgaagagacccagcagctgctcacatgccatgtacaacatcatgaagtgctgttggcgctggagtgaggacagccgccccttacttgttcagctgctccagcgcctagaagctgcttctagatctgccgatgacaaggctgtgttgcaagtgccagagttggtggtgcctgaactgtatgcagatgtggctggcatcagggcagaaagcatttcctatagcttcagtgtcctttgaagatggtcctagacaaatgactatatatgggtggaattagttccttcaagaacagagagaaggaactttctgtggcccaccaagggagaaaaaaggacatggatcttgcatctttccctaaacattttcctagacatctgaaatgctgctggatgaagctctacctctacataccatgtactcttgagctaagaatcaccatcaattgtagtttgctttccagtcccaagggctgaagtataagtggtggaccgtgtcattctaaaggaggtttttaaaatctgcaatgattgtaagggaattaggcaaaagggctggtcccactcactccaggctggtttactactgaaactagtttttcttttctttttttttaagttaaactattacagagtaaaaataaaccagatgggcatgaatgaacaccttctaatttttaaccatgaattgaatattggaattcatgagaaagaaaattctaggttctttttgctaagaggtgttaaggtgagtcaatatatccttcaaggaaaggctttgtctcatctatgttgacgggacgtaaaagtcctcgtcccgttatgaagagctgaagaagatctataagaaacaatactgagcctttccttgactatagatagaagagcatcctttcattgaactctgaggcaggtggaccatgcatgatactaagtttaattagaagcaggaggagtcatttcatgattaggaacattgttcatcccatttgtttgccagttcctgtaagactaaggagaatcagcctatagagccaaagctagaaccagggataaaaagtgtgtgtgtgtataacaaataggaagcatgaaagtcgagcaagaagacttagtaacccaggtggtcattaagaggtacagagaagaagtaatcttataggaatggatggtagcttctaatttttaaccattcattgaaataactgtgaagcaactcattaaactagtatttattgaccaaaagtagacttttcaggtgtatagctgccaaaatctctataataaagaggctaaaagaaaataaatgggagttattttactaggaaaattagagaacctatagtttccaaaaagagattctttatgtgcaaaatgagataactctctacctcacagggttggtgtgaggaacaatgagaatatgtatttgtgtattatgtagaatataatatattctcaataaatactagtttttcccctttc

SEQ ID NO: 118 - DNA, 1812 bp, Homo sapiens
gaagagggcagagccgtgcatggggctgctccccaggacctgagcaggaacctggagttttcagagctgcctgatcattgctacagaatgaactctagcccagctgggaccccaagtccacagccctccagggccaatgggaacatcaacctggggccttcagccaacccaaatgcccagcccacggacttcgacttcctcaaagtcatcggcaaagggaactacgggaaggtcctactggccaagcgcaagtctgatggggcgttctatgcagtgaaggtactacagaaaaagtccatcttaaagaagaaagagcagagccacatcatggcagagcgcagtgtgcttctgaagaacgtgcggcaccccttcctcgtgggcctgcgctactccttccagacacctgagaagctctacttcgtgctcgactatgtcaacgggggagagctcttcttccacctgcagcgggagcgccggttcctggagccccgggccaggttctacgctgctgaggtggccagcgccattggctacctgcactccctcaacatcatttacagggatctgaaaccagagaacattctcttggactgccagggacacgtggtgctgacggattttggcctctgcaaggaaggtgtagagcctgaagacaccacatccacattctgtggtacccctgagtacttggcacctgaagtgcttcggaaagagccttatgatcgagcagtggactggtggtgcttgggggcagtcctctacgagatgctccatggcctgccgcccttctacagccaagatgtatcccagatgtatgagaacattctgcaccagccgctacagatccccggaggccggacagtggccgcctgtgacctcctgcaaagccttctccacaaggaccagaggcagcggctgggctccaaagcagactttcttgagattaagaaccatgtattcttcagccccataaactgggatgacctgtaccacaagaggctaactccacccttcaacccaaatgtgacaggacctgctgacttgaagcattttgacccagagttcacccaggaagctgtgtccaagtccattggctgtacccctgacactgtggccagcagctctggggcctcaagtgcattcctgggattttcttatgcgccagaggatgatgacatcttggattgctagaagagaaggacctgtgaaactactgaggccagctggtattagtaaggaattaccttcagctgctaggaagagcgactcaaactaacaatggcttcaacgagaagcaggtttattttttccagcacataaaagaaaaataatgtttcggagtccaggactggcaggacaggtcatcagatactcagaggctgtatctctgccctgccaaccttgacaaatggcttccaatgttaggtttgctacaagatggttactggagctctagctgcctattttgtgtttagggaagggaaaatggaggaaaggggagaagagcaaagggcgcttttaaagagctttcccaaaagctccccccaatgacttttgcttccatctcactaaccacccacccctacctggaatggaggctgggaaatgtggcttatttgctgggtacgtgactatccctaataacaaaggggttttgaccctaagacattaggggagaatgttgggtaggcagccagccctcttttaccatagggcctcctggtgtttggattttgatctcaatgtgtaaaatgacagagatgtaacaagctcatagggtatcaatatctcttattgttctatgttgaaaaa

SEQ ID NO: 119 - skipped

SEQ ID NO: 120 - DNA, 1359 bp, Homo sapiens
atggaccagtactgcatcctgggccgcatcggggagggcgcccacggcatcgtcttcaaggccaagcacgtggagactggcgagataattgccctcaagaaggtggccctaaggcggttggaagacggcttccctaaccaggccctgcgggagattaaggctctgcaggagatggaggacaatcagtatgtggtacaactgaaggctgtgttcccacacggtggaggctttgtgctggcctttgagttcatgctgtcggatctggccgaggtggtgcgccatgcccagaggccactagcccaggcacaggtcaagagctacctgcagatgctgctcaagggtgtcgccttctgccatgccaacaacattgtacatcgggacctgaaacctgccaacctgctcatcagcgcctcaggccagctcaagatagcggactttggcctggctcgagtcttttccccagacggcagccgcctctacacacaccaggtggccaccaggtctgtgggctgcatcatgggggagctgttgaatgggtccccccttttcccgggcaagaacgatattgaacagctttgctatgtgcttcgcatcttgggcaccccaaaccctcaagtctggccggagctcactgagctgccggactacaacaagatctcctttaaggagcaggtgcccatgcccctggaggaggtgctgcctgacgtctctccccaggcattggatctgctgggtcaattccttctctaccctcctcaccagcgcatcgcagcttccaaggctctcctccatcagtacttcttcacagctcccctgcctgcccatccatctgagctgccgattcctcagcgtctagggggacctgcccccaaggcccatccagggcccccccacatccatgacttccacgtggaccggcctcttgagggagtcgctgttgaacccagagctgattcggcccttcatcctggaggggtgagaagttggccctggtcccgtctgcctgctcctcaggaccactcagtccacctgttcctctgccacctgcctggcttcaccctccaaggcctccccatggccacagtgggcccacaccacaccttgccccttagcccttgcgagggttggtctcgaggcagaggtcatgttcccagccaagagtatgagaacatccagtcgagcagaggagattcatggcctgtgctcggtgagccttaccttctgtgtgctactgacgtacccatcaggacagtgagctctgctgccagtcaaggcctgcatatgcagaatgacgatgcctgccttggtgctgcttcccccgagtgctgcctcctggtcaaggagaagtgcagagagtaa

SEQ ID NO: 121 - DNA, 3016 bp, Homo sapiens
gaattcgcggccgctcgacgctcagcagagctaccagctgccctgttggcttcgctggtcggatcgtcctcctggccccgccaaacaggcgagcggccccgactgtggggcatggcagtagtctcctcgttctccgccgccgctagcctagctgagtcgccggcttctgcgctaggggctcccaccgcctccgcaggctaaggagccgctgccaccaacgagctgtgagggttactatgctccctctttgccgccgtctcctcctcttgcccgcgcaggcacccctctggctgctcagtcctgcctcagtgtcaaaccagaagagaagtaaaattcaacaaaaatttatgtgtggagttccttcttaaaagaagaaaaaagtgattatttagactatggatcggagcaaacggaattcaattgcaggatttcctccacgtgtggagcgtcttgaagagtttgaaggaggtggtggaggagaaggaaatgtgagccaggtgggaagagtttggccatcttcgtatcgagctcttataagtgccttttccagactgacgcgtttggatgatttcacctgtgaaaaaatagggtctggcttcttttctgaagtgttcaaggtacgacaccgagcttctggtcaggtgatggctcttaagatgaacacattgagcagtaaccgggcaaacatgctgaaagaagtacagctcatgaatagactctcccatcccaacatccttaggtatatcaactccgggaacctggaacagttgctagacagtaacctgcatttgccttggactgtgagggtaaaactggcctatgacatagcagtgggcctcagctaccttcacttcaaaggcatttttcatcgggacctcacatctaagaactgcctgataaagagggatgagaatggttactctgcagtggtagctgactttggcctggctgagaagatccccgatgtcagcatggggagtgagaagctggccgtggtgggttccccattctggatggcacctgaggttctccgagatgagccctataatgaaaaggcagatgtgttctcttatggtatcatcctctgcgagatcatcgcccgcatccaggccgatccggactatcttccccgcacagagaatttcgggctggactatgatgctttccagcacatggtgggagactgtcccccagattttctgcaacttactttcaactgctgtaacatggatcccaaactgcgcccatcttttgtggagattgggaagaccctggaggaaattctgagccgcctacaggaagaagagcaggagagggataggaagctgcagcccacagccaggggactcttggagaaagcacctggggtgaagcgactaagctcactggatgacaagatcccccacaagtcaccatgcccaagacgtaccatctggctgtctcgaagccagtcagatatcttttcccgtaagcccccacgtacagtgagtgtcttggacccatactaccggccacgagatggtgctgcccgcacccccaaagtcaacccttttagtgctcgccaggacctcatggggggcaagatcaagttttttgacctgcccagcaagtctgtcatctctctggtatttgacctggatgcaccagggcccggaactatgcccctggctgactggcaggagcccctggccccacctattcgccggtggcgttccttgcctggttcgcctgagttcttgcatcaagaggcttgtccatttgtgggccgggaagaatcgctatctgatgggcccccaccacgcctaagtagtctcaagtacagagttaaagagatcccaccattccgggcatctgccctaccagctgctcaagcccatgaggctatggactgctccattctccaggaagaaaatggttttgggtccaggccccaggggaccagtccatgccctgcgggtgcttctgaggagatggaggtagaagaaaggccagcaggctcaactccagccaccttctccacctcaggcataggcctgcaaacccagggaaagcaggatgggtgagggggtttagtccctgcctcaccttggggatggaccttcagctgaaaccatatggccccctaggtgcacagccttgattcttccctggagcctacagagcaggcaggctaggccaagccaggctcaacttctgggctcccagtgcccattggctgtgtatgacgggaggcagcagtgagaggccttcctagttagggccaacagctgataccaagcctctgaaatccagcaaggaggtctgcctcccaccagaccctctccagtgtacttccccagataggaccagaggatgtctagttctaggctgagctggcaggcagctattaccccggttctttccccaccccaggtctgtctcttgccttttcttggggcatataagctactgagtggaacatggagctgatcaagaggccgtaatggtcatggctgtttccagacctgaatattgggtgcttcttgccagtattctaagacatttgagtaattgctgtttgcacttactgcatggtcagaccacgtcactacatttctatgcaaggggacagcaaggcagcgtggtggtcatggctcttagctaacctattcaaagaccttttcctgttgattaatctattttcatatttataaaggagtcttaatgttctgccccataagactttcaaccttgtggttgggagtggggctggttttgtaggccctagggcctgcttctatgtatttatcaacatgtgatacattcaattggttaaatggtttatacagggactgatttgcttcccttcctgccatggctggagctttgggaacagtctgtccttacagagctgcaataagaaataaccaaagatgaagctggtcaaatattttcataacttgcttctgttgattttttttttgtaaaactttcccaagacattttcagacttaaaaataaagtcagtgttacaggt

SEQ ID NO: 122 - protein, 688 aa, Homo sapiens
MADLEAVLADVSYLMAMEKSKATPAARASKRIVLPEPSIRSVMQKYLAERNEITFDKIFNQKIGFLLFKDFCLNEINEAVPQVKFYEEIKEYEKLDNEEDRLCRSRQIYDAYIMKELLSCSHPFSKQAVEHVQSHLSKKQVTSTLFQPYIEEICESLRGDIFQKFMESDKFTRFCQWKNVELNIHLTMNEFSVHRIIGRGGFGEVYGCRKADTGKMYAMKCLDKKRIKMKQGETLALNERIMLSLVSTGDCPFIVCMTYAFHTPDKLCFILDLMNGGDLHYHLSQHGVFSEKEMRFYATEIILGLEHVHNRFVVYRDLKPANILLDEHGHARISDLGLACDFSKKKPHASVGTHGYMAPEVLQKGTAYDSSADWFSLGCMLFKLLRGHSPFRQHKTKDKHEIDRMTLTVNVELPDTFSPELKSLLEGLLQRDVSKRLGCHGGGSQEVKEHSFFKGVDWQHVYLQKYPPPLIPPRGEVNAADAFDIGSFDEEDTKGIKLLDCDQELYKNFPLVISERWQQEVTETVYEAVNADTDKIEARKRAKNKQLGHEEDYALGKDCIMHGYMLKLGNPFLTQWQRRYFYLFPNRLEWRGEGESRQNLLTMEQILSVEETQIKDKKCILFRIKGGKQFVLQCESDPEFVQWKKELNETFKEAQRLLRRAPKFLNKPRSGTVELPKPSLCHRNSNGL

SEQ ID NO: 123 - protein, 378 aa, Murine sp.
CFVVYRDLKPANILLDEYGHVRISDLGLACDFSKKKPHASVGTHGYMAPEVLQKGTCYDSSADWFSLGCMLFKLLRGHSPFRQHKTKDKHEIDRMTLTVNVQLPDAFSPELRSLLEGLLQRDVSQRLGCGGGGARELKEHIFFKGIDWQHVYLRKYPPPLIPPRGEVNAADAFDIGSFDEEDTKGIKLLDCDQDLYKNFPLVISERWQQEVVETIYDAVNADTDKIEARKKAKNKQLGQEEDYAMGKDCIMHGYMLKLGNPFLTQWQRRYFYLFPNRLEWRGEGESRQSLLTMEQIMSVEETQIKDRKCILLRIKGGKQFVLQCESDPEFAQWLKELTCTFNEAQRLLRRAPKFLNKPRAAILEFSKPPLCHRNSSGL

SEQ ID NO: 124 - protein, 419 aa, Homo sapiens
  MOD_RES (196): Variable amino acid
MGSSMSAATARRPVFDDKEDVNFDHFQILRAIGKGSFGKVCIVQKRDTEKMYAMKYMNKQQCIERDEVRNVFRELEILQEIEHVFLVNLWYSFQDEEDMFMVVDLLLGGDLRYHLQQNVQFSEDTVRLYICEMALALDYLRGQHIIHRDVKPDNILLDERGHAHLTDFNIATIIKDGERATALAGTKPYMAPEIFXSFVNGGTGYSFEVDWWSVGVMAYELLRGWRPYDIHSSNAVESLVQLFSTVSVQYVPTWSKEMVALLRKLLTVNPEHRLSSLQDVQAAPALAGVLWDHLSEKRVEPGFVPNKGRLHCDPTFELEEMILESRPLHKKKKRLAKNKSRDNSRDSSQSENDYLQDCLDAIQQDFVIFNREKLKRSQDLPREPLPAPESRDAAEPVEDEAERSALPMCGPICPSAGSG

SEQ ID NO: 125 - protein, 414 aa, Homo sapiens
MGGNHSHKPPVFDENEEVNFDHFQILRAIGKGSFGKVCIVQKRDTKKMYAMKYMNKQKCIERDEVRNVFRELQIMQGLEHPFLVNLWYSFQDEEDMFMVVDLLLGGDLRYHLQQNVHFTEGTVKLYICELALALEYLQRYHIIHRDIKPDNILLDEHGHVHITDFNIATVVKGAERASSMAGTKPYMAPEVFQVYMDRGPGYSYPVDWWSLGITAYELLRGWRPYEIHSVTPIDEILNMFKVERVHYSSTWCKGMVALLRKLLTKDPESRVSSLHDIQSVPYLADMNWDAVFKKALMPGFVPNKGRLNCDPTFELEEMILESKPLHKKKKRLAKNRSRDGTKDSCPLNGHLQHCLETVREEFIIFNREKLRRQQGQGSQLLDTDSRGGGQAQSKLQDGCNNNLLTHTCTRGCSS

SEQ ID NO: 126 - protein, 729 aa, Homo sapiens
MQSTSNHLWLLSDILGQGATANVFRGRHKKTGDLFAIKVFNNISFLRPVDVQMREFEVLKKLNHKNIVKLFAIEEETTTRHKVLIMEFCPCGSLYTVLEEPSNAYGLPESEFLIVLRDVVGGMNHLRENGIVHRDIKPGNIMRVIGEDGQSVYKLTDFGAARELEDDEQFVSLYGTEEYLHPDMYERAVLRKDHQKKYGATVDLWSIGVTFYHAATGSLPFRPFEGPRRNKEVMYKIITGKPSGAISGVQKAENGPIDWSGDMPVSCSLSRGLQVLLTPVLANILEADQEKCWGFDQFFAETSDILHRMVIHVFSLQQMTAHKIYIHSYNTATIFHELVYKQTKIISSNQELIYEGRRLVLEPGRLAQHFPKTTEENPIFVVSREPLNTIGLIYEKISLPKVHPRYDLDGDASMAKAITGVVCYACRIASTLLLYQELMRKGIRWLIELIKDDYNETVHKKTEVVITLDFCIRNIEKTVKVYEKLMKINLEAAELGEISDIHTKLLRLSSSQGTIETSLQDIDSRLSPGGSLADAWAHQEGTHPKDRNVEKLQVLLNCMTEIYYQFKKDKAERRLAYNEEQIHKFDKQKLYYHATKAMTHFTDECVKKYEAFLNKSEEWIRKMLHLRKQLLSLTNQCFDIEEEVSKYQEYTNELQETLPQKMFTASSGIKHTMTPIYPSSNTLVEMTLGMKKLKEEMEGVVKELAENNHILERFGSLTMDGGLRNVDCL

SEQ ID NO: 127 - protein, 329 aa, Homo sapiens
MDPTAGSKKEPGGGAATEEGVNRIAVPKPPSIEEFSIVKPISRGAFGKVYLGQKGGKLYAVKVVKKADMINKNMTHQVQAERDALALSKSPFIVHLYYSLQSANNVYLVMEYLIGGDVKSLLHIYGYFDEEMAVKYISEVALALDYLHRHGIIHRDLKPDNMLISNEGHIKLTDFGLSKVTLNRDINMMDILTTPSMAKPRQDYSRTPGQVLSLISSLGFNTPIAEKNQDPANILSACLSETSQLSQGLVCPMSVDQKDTTPYSSKLLKSCLETVASNPGMPVKCLTSNLLQSRKRLATSSASSQSHTFISSVESECHSSPKWEKDCQV

SEQ ID NO: 128 - protein, 88 aa, Murine sp.
TRPIPWPEGEEKLSDNAQSAMDMLLTIDDSKRAGMRELKQHPLFSEVDWENLQHQTMPFVPQPDDETDTSYFEARNNAQHLTVSGFSL

SEQ ID NO: 129 - protein, 464 aa, Homo sapiens
MAMTAGTTTTFPMSNHTRERVTVAKLTLENFYSNLILQHEERETRQKKLEVAMEEEGLADEEKKLRRSQHARKETEFLRLKRTRLGLDDFESLKVIGRGAFGEVRLVQKKDTGHIYAMKILRKSDMLEKEQVAHIRAERDILVEADGAWVVKMFYSFQDKRNLYLIMEFLPGGDMMTLLMKKDTLTEEETQFYISETVLAIDAIHQLGFIHRDIKPDNLLLDAKGHVKLSDFGLCTGLKKAHRTEFYRNLTHNPPSDFSFQNMNSKRKAETWKKNRRQLAYSTVGTPDYIAPEVFMQTGYNKLCDWWSLGVIMYEMLIGYPPFCSETPQETYRKVMNWKETLVFPPEVPISEKAKDLILRFCIDSENRIGNSGVEEIKGHPFFEGVDWEHIRERPAAIPIEIKSIDDTSNFDDFPESDILQPVPNTTEPDYKSKDWVFLNYTYKRFEGLTQRGSIPTYMKAGKL

SEQ ID NO: 130 - protein, 978 aa, Homo sapiens
  MOD_RES (600): Variable amino acid
DSLLPTPALGTPLPIPWPVGSLRTPLSLESTRSPTQRLLPSTPKDPAILRSPPPARSFLGSPLSHHLLTRSRGSRTQGPPGPPGGSRVGSRRAVPGLPPWPPPPHYPAGLPGSPGPGSPPPPGGLELQSPPPLLPQIPAPGSGVSFHIQIGLTREFVLLPAASELAHVKQLACSIVDQKFPECGFYGLYDKILLFKHDPTSANLLQLVRSSGDIQEGDLVEVVLSASATFEDFQIRPHALTVHSYRAPAFCDHCGEMLFGLVRQGLKCDGCGLNYHKRCAFSIPNNCSGARKRRLSSTSLASGHSVRLGTSESLPCTAEELSRSTTELLPRRPPSSSSSSSASSYTGRPIELDKMLLSKVKVPHTFLIHSYTRPTVCQACKKLLKGLFRQGLQCKDCKFNCHKRCATRVPNDCLGEALINGDVPMEEATDFSEADKSALMDESEDSGVIPGSHSENALHASEEEEGEGGKAQSSLGYIPLMRVVQSVRHTTRKSSTTLREGWVVHYSNKDTLRKRHYWRLDCKCITLFQNNTTNRYYKEIPLSEILTVESAQNFSLVPPGTNPHCFEIVTANATYFVGEMPGGTPGGPSGQGAEAARGLXETAIRQALMPVILQDAPSAPGHAPHRQASLSISVSNSQIQENVDIATVYQIFPDEVLGSGQFGVVYGGKHRKTGRDVAVKVIDKLRFPTKQESQLRNEVAILQSLRHPGIVNLECMFETPEKVFVVMEKLHGDMLEMILSSEKGRLPERLTKFLITQILVALRHLHFKNIVHCDLKPENVLLASADPFPQVKLCDFGFARIIGEKSFRRSVVGTPAYLAPEVLLNQGYNRSLDMWSVGVIMYVSLSGTFPFNEDEDINDQIQNAAFMYPASPWSHISAGAIDLINNLLQVKMRKRYSVDKSLSHPWLQEYQTWLDLRELEGKMGERYITHESDDARWEQFAAEHPLPGSGLPTDRDLGGACPPQDHDMQGLAERISVL

SEQ ID NO: 131 - protein, 105 aa, Homo sapiens
IQFIIVGAKDLLAMDSNGLSDPYIKITNLSQKTKVIKKTLTPTWNETFFVHFPEKTTLELECWDHDTFSDDFIGKASISLAEIPALAEVDMWIDMKTKKGEFAGK

SEQ ID NO: 132 - protein, 890 aa, Homo sapiens
MSANNSPPSAQKSVLPTAIPAVLPAASPCSSPKTGLSARLSNGSFSAPSLTNSRGSVHTVSFLLQIGLTRESVTIEAQELSLSAVKDLVCSIVYQKFPECGFFGMYDKILLFRHDMNSENILQLITSADEIHEGDLVEVVLSALATVEDFQIRPHTLYVHSYKAPTFCDYCGEMLWGLVRQGLKCEGCGLNYHKRCAFKIPNNCSGVRKRRLSNVSLPGPGLSVPRPLQPEYVALPSEESHVHQEPSKRIPSWSGRPIWMEKMVMCRVKVPHTFAVHSYTRPTICQYCKRLLKGLFRQGMQCKDCKFNCHKRCASKVPRDCLGEVTFNGEPSSLGTDTDIPMDIDNNDINSDSSRGLDDTEEPSPPEDKMFFLDPSDLDVERDEEAVKTISPSTSNNIPLMRVVQSIKHTKRKSSTMVKEGWMVHYTSRDNLRKRHYWRLDSKCLTLFQNESGSKYYKEIPLSEILRISSPRDFTNISQGSNPHCFEIITDTMVYFVGENNGDSSHNPVLAATGVGLDVAQSWEKAIRQALMPVTPQASVCTSPGQGKDHKDLSTSISVSNCQIQENVDISTVYQIFADEVLGSGQFGIVYGGKHRKTGRDVAIKVIDKMRFPTKQESQLRNEVAILQNLHHPGIVNLECMFETPERVFVVMEKLHGDMLEMILSSEKSRLPERITKFMVTQILVALRNLHFKNIVHCDLKPENVLLASAEPFPQVKLCDFGFARIIGEKSFRRSVVGTPAYLAPEVLRSKGYNRSLDMWSVGVIIYVSLSGTFPFNEDEDINDQIQNAAFMYPPNPWREISGEAIDLINNLLQVKMRKRYSVDKSLSHPWLQDYQTWLDLREFETRIGERYITHESDDARWEIHAYTHNLVYPKHFIMAPNPDDMEEDP

SEQ ID NO: 133 - protein, 889 aa, Homo sapiens
MEEGAPRQPGPSQWPPEDEKEVIRRAIQKELKIKEGVENLRRVATDRRHLGHVQQLLRSSNRRLEQLHGELRELHARILLPGPGPGPAEPVASGPRPWAEQLRARHLEALRRQLHVELKVKQGAENMTHTCASGTPKERKLLAAAQQMLRDSQLKVALLRMKISSLEASGSPEPGPELLAEELQHRLHVEAAVAEGAKNVVKLLSSRRTQDRKALAEAQAQLQESSQKLDLLRLALEQLLEQLPPAHPLRSRVTRELRAAVPGYPQPSGTPVKPTALTGTLQVRLLGCEQLLTAVPGRSPAAALASSPSEGWLRTKAKHQRGRGELASEVLAVLKVDNRVVGQTGWGQVAEQSWDQTFVIPLERARELEIGVHWRDWRQLCGVAFLRLEDFLDNACHQLSLSLVPQGLLFAQVTFCDPVIERRPRLQRQERIFSKRRGQDFLRRSQMNLGMAAWGRLVMNLLPPCSSPSTISPPKGCPRTPTTLREASDPATPSNFLPKKTPLGEEMTPPPKPPRLYLPQEPTSEETPRTKRPHMEPRTRRGPSPPASPTRKPPRLQDFRCLAVLGRGHFGKVLLVQFKGTGKYYAIKALKKQEVLSRDEIESLYCEKRILEAVGCTGHPFLLSLLVCFQTSSHARFVTEFVPGGDLMMQIHEDVFPEPQARFYVACVVLGLQFLHEKKIIYRDLKLDNLLLDAQGFLKIADFGLCKEGIGFGDRTSTFCGTPEFLAPEVLTQEAYTQAVDWWALGVLLYEMLVGECPFPGDTEEEVFDCIVNMDAPYPGFLSVQGLEFIQKLLQKCPEKRLGAGEQDAEEIKVQPFFRTTNWQALLARTIQPPFVPTLCGPADLRYFEGEFTGLPPALTPPAPHSLLTARQQAAFRDFDFVSERFLEP

SEQ ID NO: 134 - protein, 205 aa, Murine sp.
LKWDNLLLDAQGFLKIADFGLCKEGIGFGDRTSTFCGTPEFLAPEVLTQEAYTRAVDWWGLGVLLYEMLVGECPFPGDTEEEVFDCIVNMDAPYPGFLSVQGLEFIQKLLQKCPEKRLGAGEQDAEEIKVQPFFRTTNWQALLARTIQPPFVPTLCGPADLRYFEGEFTGLPPALTPPAPHSLLTARQQAAFRDFDFVSERFLEP

SEQ ID NO: 135 - protein, 384 aa, Homo sapiens
GGNIRGPWARGWKSLWTGLGTIRSDLEELWELRGHHYLHQESLKPAPVLVEKPLPEWPVPQFINLFLPEFPIRPIRGQQQLKILGLVAKGSFGTVLKVLDCTQKAVFAVKVVPKVKVLQRDTVRQCKEEVSIQRQINHPFVHSLGDSWQGKRHLFIMCSYCSTDLYSLWSAVGCFPEASIRLFAAELVLVLCYLHDLGIMHRDVKMENILLDERGHLKLTDFGLSRHVPQGAQAYTICGTLQYMAPEVLSGGPYNHAADWWSLGVLLFSLATGKFPVAAERDHVAMLASVTHSDSEIPASLNQGLSLLLHELLCQNPLHRLRYLHHFQVHPFFRGVAFDPELLQKQPVNFVTETQATQPSSAETMPFDDFDCDLESFLLYPIPA

SEQ ID NO: 136 - protein, 469 aa, Homo sapiens
MEFFRIDSKDSASELLGLDFGEKLYSLKSEPLKPFFTLPDGDSASRSFNTSESKVEFKAQDTISRGSDDSVPVISFKDAAFDDVSGTDEGRPDLLVNLPGELESTREAAAMGPTKFTQTNIGIIENKLLEAPDVLCLRLSTEQCQAHEEKGIEELSDPSGPKSYSITEKHYAQEDPRMLFVAAVDHSSSGDMSLLPSSDPKFQGLGVVESAVTANNTEESLFRICSPLSGANEYIASTDTLKTEEVLLFTDQTDDLAKEEPTSLFQRDSETKGESGLVLEGDKEIHQIFEDLDKKLALASRFYIPEGCIQRWAAEMVVALDALHREGIVCRDLNPNNILLNDRGHIQLTYFSRWSEVEDSCDSDAIERMYCAPEVGAITEETEACDWWSLGAVLFELLTGKTLVECHPAGINTHTTLNMPECVSEEARSLIQQLLQFNPLERLGAGVAGVEDIKSHPFFTPVDWAELMR

SEQ ID NO: 137 - protein, 745 aa, Homo sapiens
MLPFAPQDEPWDREMEVFSGGGASSGEVNGLKMVDEPMEEGEADSCHDEGVVKEIPITHHVKEGYEKADPAQFELLKVLGQGSFGKVFLVRKKTGPDAGQLYAMKVLKKASLKVRDRVRTKMERDILVEVNHPFIVKLHYAFQTEGKLYLILDFLRGGDVFTRLSKEVLFTEEDVKFYLAELALALDHLHQLGIVYRDLKPENILLDEIGHIKLTDFGLSKESVDQEKKAYSFCGTVEYMAPEVVNRRGHSQSADWWSYGVLMFEMLTGTLPFQGKDRNETMNMILKAKLGMPQFLSAEAQSLLRMLFKRNPANRLGSEGVEEIKRHLFFANIDWDKLYKREVQPPFKPASGKPDDTFCFDPEFTAKTPKDSPGLPASANAHQLFKGFSFVATSIAEEYKITPITSANVLPIVQINGNAAQFGEVYELKEDIGVGSYSVCKRCIHATTNMEFAVKIIDKSKRDPSEEIEILMRYGQHPNIITLKDVFDDGRYVYLVTDLMKGGELLDRILKQKCFSEREASDILYVISKTVDYLHCQGVVHRDLKPSNILYMDESASADSIRICDFGFAKQLRGENGLLLTPCYTANFVAPEVLMQQGYDAACDIWSLGVLFYTMLAGYTPFANGPNDTPEEILLRIGNGKFSLSGGNWDNISDGAKDLLSHMLHMDPHQRYTAEQILKHSWITHRDQLPNDQPKRNDVSHVVKGAMVATYSALTHKTFQPVLEPVAASSLAQRRSMKKRTSTGL

SEQ ID NO: 138 - protein, 549 aa, Homo sapiens
MSLVACECLPSPGLEPEPCSRARSQAHVYLEQIRNRVALGVPDMTKRDYLVDAATQIRLALERDVSEDYEAAFNHYQNGVDVLLRGIHVDPNKERREAVKLKITKYLRRAEEIFNCHLQRPLSSGASPSAGFSSLRLRPIRTLSSAVEQLRGCRVVGVIEKVQLVQDPATGGTFVVKSLPRCHMVSRERLTIIPHGVPYMTKLLRYFVSEDSIFLHLEHVQGGTLWSHLLSQAHSRHSGLSSGSTQERMKAQLNPHLNLLTPARLPSGHAPGQDRIALEPPRTSPNLLLAGEAPSTRPQREAEGEPTARTSTSGSSDLPKAPGGHLHLQARRAGQNSDAGPPRGLTWVPEGAGPVLGGCGRGMDQSCLSADGAGRGCGRATWSVREEQVKQWAAEMLVALEALHEQGVLCRDLHPGNLLLDQAGHIRLTYFGQWSEVEPQCCGEAVDNLYSAPEVGGISELTEACDWWSFGSLLYELLTGMALSQSHPSGIQAHTQLQLPEWLSRPAASLLTELLQFEPTRRLGMGEGGVSKLKSHPFFSTIQWSKLVG

SEQ ID NO: 139 - protein, 431 aa, Homo sapiens [sequence omitted]

SEQ ID NO: 140 - protein, 430 aa, Murine sp.
  MOD_RES (241): Variable amino acid
MTVKAEAARSTLTYSRMRGMVAILIAFMKQRRMGLNDFIQKIASNTYACKHAEVQSILKMSHPQEPELMNANPSPPPSPSQQINLGPSSNPHAKPSDFHFLKVIGKGSFGKVLLARHKAEEVFYAVKVLQKKAILKKKEEKHIMSERNVLLKNVKHPFLVGLHFSFQTADKLYFVLDYINGGELFYHLQRERCFLEPRARFYAAEIASALGYLHSLNIVYRDLKPENILLDSQGHIVLTDXFQLRRIEHNGTTSTFCGTPEYLAPEVLHKQPYDRTVDWWCLGAVLYEMLYGLPPFYSRNTAEMYDNILNKPLQLKPNITNSARHLLEGLLQKDRTKRLGAKDDFMEIKSHIFFSLINWDDLINKKITPPFNPNVSGPSDLRHFDPEFTEEPVPSSIGRSPDSILVTASVKEAAEAFLGFSYAPPVDSFL

SEQ ID NO: 141 - protein, 244 aa, Murine sp.
HLQRERRFLEPRARFYAAEVASAIGYLHSLNIIYRDLKPENILLDCQGHVVLTDFGLCKEGVEPEDTTSTFCGTPEYLAPEVLRKEPYDRAVDWWCLGAVLYEMLHGLPPFYSQDVSQMYENILHQPLQIPGGRTVAACDLLQSLLHKDQRQRLGSKADFLEIKNHVFFSPINWDDLYHKRLTPPFNPNVTGPADLKHFDPEFTQEAVSKSIGCTPDTVASSSGASSAFLGFSYAPEDDDILDC

SEQ ID NO: 142 - protein, 446 aa, Homo sapiens
  MOD_RES (17): Variable amino acid
  MOD_RES (68): Variable amino acid
MQRDHTMDYKESCPSVXIPSSDEHREKKKRFTVYKVLVSVGRSEWFVFRRYAEFDKLYNTLKKQFPAXALKIPAKRIFGDNFDPDFIKQRRAGLNEFIQNLVRYPELYNHPDVRAFLQMDSPKHQSDPSEDEDERSSQKLHSTSQNINLGPSGNPHAKPTDFDFLKVIGKGSFGKVLLAKRKLDGKFYAVKVLQKKIVLNRKEQKHIMAERNVLLKNVKHPFLVGLHYSFQTTEKLYFVLDFVNGGEGHVVLTDFGLCKEGIAISDTTTTFCGTPEYLAPEVIRKQPYDNTVDWWCLGAVLYEMLYGLPPFYCRDVAEMYDNILHKPLSLRPGVSLTAWSILEELLEKDRQNRLGAKEDFLEIQNHPFFESLSWADLVQKKIPPPFNPNVAGPDDIRNFDTAFTEETVPYSVCVSSDYSIVNASVLEADDAFVGFSYAPPSEDLFL

SEQ ID NO: 143 - protein, 349 aa, Homo sapiens
MAHQTGIHATEELKEFFAKARAGSVRLIKVVIEDEQLVLGASQEPVGRWDQDYDRAVLPLLDAQQPCYLLYRLDSQNAQGFEWLFLAWSPDNSPVRLKMLYAATRATVKKEFGGGHIKDELFGTVKDDLSFAGYQKHLSSCAAPAPLTSAERELQQIRINEVKTEISVESKHQTLQGLAFPLQPEAQRALQQLKQKMVNYIQMKLDLERETIELVHTEPTDVAQLPSRVPRDAARYHFFLYKHTHEGDPLESVVFIYSMPGYKCSIKERMLYSSCKSRLLDSVEQDFHLEIAKKIEIGDGAELTAEFLYDEVHPKQHAFKQAFAKPKGPGGKRGHKRLIRGPGENGDDS

SEQ ID NO: 144 - protein, 440 aa, Homo sapiens
MSKLRMKRRASDRGAGETSARAKALGSGISGNNAKRAGPFILGPRLGNSPVPSIVQCLARKDGTDDFYQLKILTLEERGDQGIESQEERQGKMLLHTEYSLLSLLHTQDGVVHHHGLFQDRTCEIVEDTESSRMVKKMKKRICLVLDCLCAHDFSDKTADLINLQHYVIKEKRLSERETVVIFYDVVRVVEALHQKNIVHRDLKLGNMVLNKRTHRITITNFCLGKHLVSEGDLLKDQRGSPAYISPDVLSGRPYRGKPSDMWALGVVLFTMLYGQFPFYDSIPQELFRKIKAAEYTIPEDGRVSENTVCLIRKLLVLDPQQRLAAADVLEALSAIIASWQSLSSLSGPLQVVPDIDDQMSNADSSQEAKVTEECSQYEFENYMRQQLLLAEEKSSIHDTRSWVPKRQFGSAPPVRRLGHDAQPMTSLDTAILAQRYLRK

SEQ ID NO: 145 - protein, 692 aa, Homo sapiens
  MOD_RES (237): Variable amino acid
  MOD_RES (528): Variable amino acid
MASTRSIELEHFEERDKRPRPGSRRGAPSSSGGSSSSGPKGNGLIPSPAHSAHCSFYRTRTLQALSSEKKAKKARFYRNGDRYFKGLVFAISSDRFRSFDALLIELTRSLSDNVNLPQGVRTIYTIDGSRKVTSLDELLEGESYVCASNEPFRKVDYTKNINPNWSVNIKGGTSRALAAASSVKSEVKESKDFIKPKLVTVIRSGVKPRKAVRILLNKKTAHSFEQVLTDITEAIKXASGVVKRLCTLDGKQVRVTCVHLPDFFGDDDVFIACGPEKFRYAQDDFVLDHSECRVLKSSYSRSSAVKYSGSKSPGPSRRSQISAHGRSSSNVNGGPELDRCISPEGVNGNRCSESSTLLEKYKIGKVIGDGNFAVVKECIDRSTGKEFALKIIDKAKCCGKEHLIENEVSILRRVKHPNIIMLVEEMETATELFLVMELVKGGDLFDAITSSTKYTERDGSAMVYNLANALRYLHGLSIVHRDIKPENLLVCEYPDGTKSLKLGDFGLATVVEGPLYTVCGTPTYVAPXIIAETGYGLKVDIWAAGVITYILLCGFPPFRSENNLQEDLFDQILAGKLEFPAPYWDNITDSAKELISQMLQVNVEARCTAGQILSHPWVSDDASQENNMQAEVTGKLKQHFNNALPKQNSTTTGVSVIMVSGRRQVWPDCGAGLEVFELGSRELPSHGSWCLP

SEQ ID NO: 146 - protein, 297 aa, Murine sp.
TKSSSSSPTSPGSFRGLKISAQGRSSSNVNGGPELDRCLSPEGVNGNRCSESFPLLEKYRIGKVIGDGNFAVVKECVDRYTGKEFALKIIDKAKCCGKEHLIENEVSILRRVKHPNIIMLVEEMETATDLFLVMELVKGGDLFDAITSSTKYTERDGSAMVYNLANALRYLHSLSIVHRDIKPENLLVCEYPDGTKSLKLGDFGLATVVEGPLYTVCGTPTYVAPEIIAETGYGLKVDVWAAGVITYILLCGFPPFRSENNLQEDLFDQILAGKLEFPAPYWDNITDSPCVCFRKCL

SEQ ID NO: 147 - protein, 686 aa, Homo sapiens
  MOD_RES (594)..(595): Variable amino acid
PAAKRVVVYRNGDPFFPGSQLVVTQRRFPTMEAFLCEVTSAVQAPLAVRALYTPCHGHPVTNLADLKNRGQYVAAGFERFHKLPPYQAFCLSVFRNGDLVSPPFSLKLSQAASQDWETVLKLLTEKVKLQSGAVRLCTLEGLPLSAGKELVTGHYYVAVGEDEFKDLPYPALSTRGLLAAGNEAHLRSGVGTVAGSPKPLGRKAKKETCLIVTLTLKYQQSETSRDGQSFPSGVIGVYGAPHRRKETAGALEVADDEDTQTEEPLDQRAAQIVEQVTCLQDFFGDDDVFIACGPEKFRYAQDDFVLDHSRRRLLREHQAGFEKLRRTRGEEKEAEKEKKPCMSGGRRMTLRDDQPAKLEKEPKTRPEENKPERPSGRKPRPMGIIAANVEKHYETGRVIGDGNFAVVKECRHRETRQAYAMKIIDKSRLKGKEDMVDSEILIIQSLSHPNIVKLHEVYETDMEIYLILEYVQGGDLFDAIIESVKFPEPDAALMIMDLCKALVHMHDKSIVHRDLKPENLLVQRNEDKSTTLKLADFGLAKHVVRPIFTVCGTPTYVAPEILSEKGYGLEVDMWAAGVILYILLCGFPPFRSPXXGDQDELFNIIQLGHFEFLPPYWDNISDAAKDLVSRLLVVDPKKRYTAHQVLQHPWIETAGKTNTVKRQKQVSPSSDGHFRSQHKRVVEQVS

SEQ ID NO: 148 - protein, 806 aa, Murine sp.
MPTAPVLRPPPPPATPAPPAPSRPAPPIPGHRGPCDHSLKCLSSKISERKLPGPWLPAGRGPLEKPVLGPRGAVMPLFSPQSSLHSVRAEHSPLKPRVVTVVKLGGQPLRKATLLLNRRSVQTFEQLLSDISEALGFPRWKNDRVRKLFTLKGREVKSVSDFFREGDAFIAMGKEPLTLKSIQLAMEELYPKNRALALAPHSRVPSPRLRSRLPSKLLKGSHRCGEAGSYSAEMESKAVSRHQGKTSTVLAPEDKARAQKWVRGKQESEPGGPPSPGAATQEETHASGEKHLGVEIEKTSGEIVRCEKCKRERELQLGLQREPCPLGTSELDLGRAQKRDSEKLVRTKSCRRPSKAKFTDGEEGWKGDSHRGSPRDPPQEMRRPNSNSDKKEIRGSESQDSYPQGAPKAQKDFVEGPPAVEEGPIDMRREDRHTCRSKHAAWLRREQQAEPPQLPRTRGEEKQAEHEKKPGGLGERRAPEKESKRKLEEKRPERPSGRKPRPKGIISADVEKHYDIGGVIGDGNFATVKECRHRETKQAYAMKMIDKSQLKGKEDIVDSEILIIQSLSHPNIVKLHEVYETEAEIYLIMEYVQGGDLFDAIVENVKFPEPEAAVMITDLCKAFVHMHDKNIVHRDVKPENLLVQRNEDKSITLKLADFGLAKYVVRPIFTVCGTPTYVAPEILSEKGYGLEVDMWAAGVILYILLCGFPPFRSPERDQDELFNIIQVGQFEFLSPYWDNISDAAKDLVRNLLEVDPKKRYTAEQVLQHPWIEMVGHTNTGNSQKEESPNSLGHFQSQHKKVAEQMP

SEQ ID NO: 149 - protein, 372 aa, Homo sapiens
MSRRRFDCRSISGLLTTTPQIPIKMENFNNFYILTSKELGRGKFAVVRQCISKSTGQEYAAKFLKKRRRGQDCRAEILHEIAVLELAKSCPRVINLHEVYENTSEIILILEYAAGGEIFSLCLPELAEMVSENDVIRLIKQILEGVYYLHQNNIVHLDLKPQNILLSSIYPLGDIKIVDFGMSRKIGHACELREIMGTPEYLAPEILNYDPITTATDMWNIGIIAYMLLTHTSPFVGEDNQETYLNISQVNVDYSEETFSSVSQLATDFIQSLLVKNPEKRPTAEICLSHSWLQQWDFENLFHPEETSSSSQTQDHSVRSSEDKTSKSSCNGTCGDREDKENIPEDSSMVSKRFRFDDSLPNPHELVSDLLC

SEQ ID NO: 150 - protein, 372 aa, Murine sp.
MSRRRFDCRSVSGLLTTTPQTPIKTENFNNFYTLTPKELGRGKFAVVRQCISKSTGQEYAAKSLKKRRRGQDCRAEILHEIAVLELARSCPHVINLHEVYENATEIILVLEYAAGGEIFNLCLPELAEMVSENDVIRLIKQILEGVHYLHQNNIVHLDLKPQNILLSSIYPLGDIKIVDFGMSRKIGNASELREIMGTPEYLAPEILNYDPITTATDMWNIGIIAYMLLTHTSPFVGEDNQETYLNISQVNVDYSEEMFSSVSQLATDFIQSLLVKNPEKRPTAESCLSHSWLQQWDFGSLFHPEETSGSSQIQDLTLRSSEEKTSKSSCNGSCGAREDKENIPEDGSLVSKRFRFDDSLPSPHELVPDLFC

SEQ ID NO: 151 - protein, 414 aa, Homo sapiens
MIPLEKPGSGGSSPGATSGSGRAGRGLSGPCRPPPPPQARGLLTEIRAVVRTEPFQDGYSLCPGRELGRGKFAVVRKCIKKDSGKEFAAKFMRKRRKGQDCRMEIIHEIAVLELAQDNPWVINLHEVYETASEMILVLEYAAGGEIFDQCVADREEAFKEKDVQRLMRQILEGVHFLHTRDVVHLDLKPQNILLTSESPLGDIKIVDFGLSRILKNSEELREIMGTPEYVAPEILSYDPISMATDMWSIGVLTYVMLTGISPFLGNDKQETFLNISQMNLSYSEEEFDVLSESAVDFIRTLLVKKPEDRATAEECLKHPWLTQSSIQEPSFRMEKALEEANALQEGHSVPEINSDTDKSETEESIVTEELIVVTSYTLGQCRQSEKEKMEQKAISKRFKFEEPLLQEIPGEFIY

SEQ ID NO: 152 - protein, 1311 aa, Homo sapiens
MPARIGYYEIDRTIGKGNFAVVKRATHLVTKAKVAIKIIDKTQLDEENLKKIFREVQIMKMLCHPHIIRLYQVMETERMIYLVTEYASGGEIFDHLVAHGRMAEKEARRKFKQIVTAVYFCHCRNIVHRDLKAENLLLDANLNIKIADFGFSNLFTPGQLLKTWCGSPPYAAPELFEGKEYDGPKVDIWSLGVVLYVLVCGALPFDGSTLQNLRARVLSGKFRIPFFMSTECEHLIRHMLVLDPNKRLSMEQICKHKWMKLGDADPNFDRLIAECQQLKEERQVDPLNEDVLLAMEDMGLDKEQTLQSLRSDAYDHYSAIYSLLCDRHKRHKTLRLGALPSMPRALAFQAPVNIQAEQAGTAMNISVPQVQLINPENQIVEPDGTLNLDSDEGEEPSPEALVRYLSMRRHTVGVADPRTEVMEDLQKLLPGFPGVNPQAPFLQVAPNVNFMHNLLPMQNLQPTGQLEYKEQSLLQPPTLQLLNGMGPLGRRASDGGANIQLHAQQLLKRPRGPSPLVTMTPAVPAVTPVDEESSDGEPDQEAVQRYLANRSKRHTLAMTNPTAEIPPDLQRQLGQQPFRSRVWPPHLVPDQHRSTYKDSNTLHLPTERFSPVRRFSDGAASIQAFKAHLEKMGNNSSIKQLQQECEQLQKMYGGQIDERTLEKTQQQHMLYQQEQHHQILQQQIQDSICPPQPSPPLQAACENQPALLTHQLQRLRIQPSSPPPNHPNNHLFRQPSNSPPPMSSAMIQPHGAASSSQFQGLPSRSAIFQQQPENCSSPPNVALTCLGMQQPAQSQQVTIQVQEPVDMLSNMPGTAAGSSGRGISISPSAGQMQMQHRTNLMATLSYGHRPLSKQLSADSAEAHSLNVNRFSPANYDQAHLHPHLFSDQSRGSPSSYSPSTGVGFSPTQALKVPPLDQFPTFPPSAHQQPPHYTTSALQQALLSPTPPDYTRHQQVPHILQGLLSPRHSLTGHSDIRLPPTEFAQLIKRQQQQRQQQQQQQQQQEYQELFRHMNQGDAGSLAPSLGGQSMTERQALSYQNADSYHHHTSPQHLLQIRAQECVSQASSPTPPHGYAHQPALMHSESMEEDCSCEGAKDGFQDSKSSSTLTKGCHDSPLLLSTGGPGDPESLLGTVSHAQELGIHPYGHQPTAAFSKNKVPSREPVIGNCMDRSSPGQAVELPDHNGLGYPARPSVHEHHRPRALQRHHTIQNSDDAYVQLDNLPGMSLVAGKALSSARMSDAVLSQSSLMGSQQFQDGENEECGASLGGHEHPDLSDGSQHLNSSCYPSTCITDILLSYKHPEVSFSMEQAGV

SEQ ID NO: 153 - protein, 436 aa, Homo sapiens
MTAVYMNGGGLVNPHYARWDRRDSVESGCQTESSKEGEEGQPRQLTPFEKLTQDMSQDEKVVREITLGKRIGFYRIRGEIGSGNFSQVKLGIHSLTKEKVAIKILDKTKLDQKTQRLLSREISSMEKLHHPNIIRLYEVVETLSKLHLVMEYAGGGELFGKISTEGKLSEPESKLIFSQIVSAVKHMHENQIIHRDLKAENVFYTSNTCVKVGDFGFSTVSKKGEMLNTFCGSPPYAAPELFRDEHYIGIYVDIWALGVLLYFMVTGTMPFRAETVAKLKKSILEGTYSVPPHVSEPCHRLIRGVLQQIPTERYGIDCIMNDEWMQGVPYPTPLEPFQLDPKHLSETSTLKEEENEVKSTLEHLGITEEHIRNNQGRDARSSITGVYRIILHRVQRKKALESVPVMMLPDPKERDLKKGSRVYRGIRHTSKFCSIL

SEQ ID NO: 154 - protein, 729 aa, Homo sapiens [sequence omitted]

SEQ ID NO: 155 - protein, 520 aa, Murine sp.
KGPSWSSRSLGARCRNSIASCPEEQPHVGNYRLLRTIGKGNFAKVKLARHILTGREVAIKIIDKTQLNPSSLQKLFREVRIMKGLNHPNIVKLFEVIETEKTLYLVMEYASAGEVFDYLVSHGRMKEKEARAKFRQIVSAVHYCHQKNIVHRDLKAENLLLDAEANIKIADFGFSNEFTLGSKLDTFCGSPPYAAPELFQGKKYDGPEVDIWSLGVILYTLVSGSLPFDGHNLKELRERVLRGKYRVPFYMSTDCESILRRFLVLNPAKRCTLEQIMKDKWINIGYEGEELKPDTELKEERMPGRKASCSAVGSGSRGLPPSSPMVSSAHNPNKAEIPERRKDSTSTPNNLPPSMMTRRNTYVCTERPGSERPSLLPNGKENSSGTSRVPPASPSSHSLAPPSGERSRLARGSTIRSTFHGGQVRDRRAGSGSGGGVQNGPPASPTLAHEAAPLPSGRPRPTTNLFTKLTSKLTRRVTDEPERIGGPEVTSCHLPWDKTETAPRLLRFPWSVKLTSSRPS

SEQ ID NO: 156 - protein, 1330 aa, Homo sapiens
MEVGGLTVFEEDQRCLSQSLPLPVSAEGPAAQTTAEPSRSFSSAHRHLSRRNGLSRLCQSRTALSEDRWSSYCLSSLAAQNICTSKLHCPAAPEHTDPSEPRGSVSCCSLLRGLSSGWSSPLLPAPVCNPNKAIFTVDAKTTEILVANDKACGLLGYSSQDLIGQKLTQFFLRSDSDVVEALSEEHMEADGHAAVVFGTVVDIITRSGEKIPVSVWMKRMRQERRLCCVVVLEPVERVSTWVAFQSDGTITSCDSLFAHLHGYVSGEDVAGQHITDLIPSVQLPPSGQHIPKNLKIQRSVGRARDGTTFPLSLKLKSQPSSEEATTGEAAPVSGYRASVWVFCTISGLITLLPDGTIHGINHSFALTLFGYGKTELLGKNITFLIPGFYSYMDLAYNSSLQLPDLASCLDVGNESGCGERTLDPWQGQDPAEGGQDPRINVVLAGGHVVPRDEIRKLMESQDIFTGTQTELIAGGQLLSCLSPQPAPGVDNVPEGSLPVHGEQALPKDQQITALGREEPVAIESPGQDLLGESRSEPVDVKPFASCEDSEAPVPAEDGGSDAGMCGLCQKAQLERMGVSGPSGSDLWAGAAVAKPQAKGQLAGGSLLMHCPCYGSEWGLWWRSQDLAPSPSGMAGLSFGTPTLDEPWLGVENDREELQTCLIKEQLSQLSLAGALDVPHAELVPTECQAVTAPVSSCDLGGRDLCGGCTGSSSACYALATDLPGGLEAVEAQEVDVNSFSWNLKELFFSDQTDQTSSNCSCATSELRETPSSLAVGSDPDVGSLQEQGSCVLDDRELLLLTGTCVDLGQGRRFRESCVGHDPTEPLEVCLVSSEHYAASDRESPGHVPSTLDAGPEDTCPSAEEPRLNVQVTSTPVIVMRGAAGLQREIQEGAYSGSCYHRDGLRLSIQFEVRRVELQGPTPLFCCWLVKDLLHSQRDSAARTRLFLASLPGSTHSTAAELTGPSLVEVLRARPWFEEPPKAVELEGLAACEGEYSQKYSTMSPLGSGAFGFVWTAVDKGKNKEVVVKFIKKEKVLEDCWIEDPKLGKVTLEIAILSRVEHANIIKVLDIFENQGFFQLVMEKHGSGLDLFAFIDRHPRLDEPLASYIFRQVRAGQSRLVSAVGYLRLKDIIHRDIKDENIVIAEDFTIKLIDFGSAAYLERGKLFYTFCGTIEYCAPEVLMGNPYRGPELEMWSLGVTLYTLVFEENPFCELEETVEAAIHPPYLVSKELMSLVSGLLQPVPERRTTLEKLVTDPWVTQPVNLADYTWEEVFRVNKPESGVLSAASLEMGNRSLSDVAQAQELCGGPVPGEAPNGQGCLHPGDPRLLTS

SEQ ID NO: 157 - protein, 230 aa, Murine sp.
TRPHPCLDEPLASFIFRQLVSAVGYLHSQGIIHRDIKDENIVIAEDFTIKLIDFGSAAYLERGKLFYTFCGTIEYCAPEVLIGNPYRGPELEMWSLGVTLYTLIFEENPFCEVEETMEAVIHPPFLVSQELMSLLSGLLQPCPEQRTTLEKLIRDPWVTQPVNLASYTWEEVCRTNQPESGLLSAASLEIGSRSPSEMAQREGLCGPPAPRETRGDQHCLHLKDPSLPVS

SEQ ID NO: 158 - protein, 926 aa, Homo sapiens
  MOD_RES (314): Variable amino acid
MVMADGPRHLQRGPVRVGFYDIEGTLGKGNFAVVKLGRHRITKTEVAIKIIDKSQLDAVNLEKIYREVQIMKMLDHPHIIKLYQVMETKSMLYLVTEYAKNGEIFDYLANHGRLNESEARRKFWQILSAVDYCHGRKIVHRDLKAENLLLDNNMNIKIADFGFGNFFKSGELLATWCGSPPYAAPEVFEGQQYEGPQLDIWSMGVVLYVLVCGALPFDGPTLPILRQRVLEGRFRIPYFMSEDCEHLIRRMLVLDPSKRLTIAQIKEHKWMLIEVPVQRPVLYPQEQENEPSIGEFNEQVLRLMHSLGIDQQKXIESLQNKSYNHFAAIYFLLVERLKSHRSSFPVEQRLDGRQRRPSTIAEQTVAKAQTVGLPVTMHSPNMRLLRSALLPQASNVEAFSFPASGCQAEAAFMEEECVDTPKVNGCLLDPVPPVLVRKGCQSLPSNMMETSIDEGLETEGEAEEDPAHAFEAFQSTRSGQRRHTLSEVTNQLVVMPGAGKIFSMNDSPSLDSVDSEYDMGSVQRDLNFLEDNPSLKDIMLANQPSPRMTSPFISLRPTNPAMQALSSQKREVHNRSPVSFREGRRASDTSLTQGIVAFRQHLQNLARTKGILELNKVQLLYEQIGPEADPNLAPAAPQLQDLASSCPQEEVSQQQESVSTLPASVHPQLSPRQSLETQYLQHRLQKPSLLSKAQNTCQLYCKEPPRSLEQQLQEHRLQQKRLFLQKQSQLQAYFNQMQIAESSYPQPSQQLPLPRQETPPPSQQAPPFSLTQPLSPVLEPSSEQMQYSPFLSQYQEMQLQPLPSTSGPRAAPPLPTQLQQQQPPPPPPPPPPRQPGAAPAPLQFSYQTCELPSAASPAPDYPTPCQYPVDGAQQSDLTGPDCPRSPGLQEAPSSYDPLALSELPGLFDCEMLDAVDPQHNGYVLVN

SEQ ID NO: 159 - protein, 629 aa, Homo sapiens
  MOD_RES (278): Variable amino acid
MESLVFARRSGPTPSAAELARPLAEGLIKSPKPLMKKQAVKRHHHKHNLRHRYEFLETLGKGTYGKVKKARESSGRLVAIKSIRKDKIKDEQDLMHIRREIEIMSSLNHPHIIAIHEVFENSSKIVIVMEYASRGDLYDYISERQQLSEREARHFFRQIVSAVHYCHQNRVVHRDLKLENILLDANGNIKIADFGLSNLYHQGKFLQTFCGSPLYASPEIVNGKPYTGPEVDSWSLGVLLYILVHGTMPFDGHDHKILVKQISNGAYREPPKPSDCLXGLIRWLLMVNPTRRATLEDVASHWWVNWGYATRVGEQEAPHEGGHPGSDSARASMADWLRRSSRPLLENGAKVCSFFKQHAPGGGSTTPGLERQHSLKKSRKENDMAQSLHSDTADDTAHRPGKSNLKLPKGILKKKVSASAEGVQEDPPELSPIPASPGQAAPLLPKKGILKKPRQRESGYYSSPEPSESGELLDAGDVFVSGDPKEQKPPQASGLLLHRKGILKLNGKFSQTALELAAPTTFGSLDELAPPRPLARASRPSGAVSEDSILSSESFDQLDLPERLPEPPLRGCVSVDNLTGLEEPPSEGPGSCLRRWRQDPLGDSCFSLTDCQEVTATYRQALRVCSKLT

SEQ ID NO: 160 - protein, 714 aa, Homo sapiens
MPAAAGDGLLGEPAAPGGGGGAEDAARPAAACEGSFLPAWVSGVPRERLRDFQHHKRVGNYLIGSRKLGEGSFAKVREGLHVLTGEKVAIKVIDKKRAKKDTYVTKNLRREGQIQQMIRHPNITQLLDILETENSYYLVMELCPGGNLMHKIYEKKRLEESEARRYIRQLISAVEHLHRAGVVHRDLKIENLLLDEDNNIKLIDFGLSNCAGILGYSDPFSTQCGSPAYAAPELLARKKYGPKIDVWSIGVNMYAMLTGTLPFTVEPFSLRALYQKMVDKEMNPLPTQLSTGAISFLRSLLEPDPVKRPNIQQALANRWLNENYTGKVPCNVTYPNRISLEDLSPSVVLHMTEKLGYKNSDVINTVLSNRACHILAIYFLLNKKLERYLSGKSDIQDSLCYKTRLYQIEKYRAPKESYEASLDTWTRDLEFHAVQDKKPKEQEKRGDFLHRPFSKKLDKNLPSHKQPSGSLMTQIQNTKALLKDRKASKSSFPDKDSFGCRNIFRKTSDSNCVASSSMEFIPVPPPRTPRIVKKPEPHQPGPGSTGIPHKEDPLMLDMVRSFESVDRDDHVEVLSPSHHYRILNSPVSLARRNSSERTLSPGLPSGSMSPLHTPLHPTLVSFAHEDKNSPPKEEGLCCPPPVPSNGPMQPLGSPNCVKSRGRFPMMGIGQMLRKRHQSLQPSADRPLEASLPPLQPLAPVNLAFDMADGVKTQC

SEQ ID NO: 161 - protein, 874 aa, Homo sapiens
MDTKLNMLNEKVDQLLHFQEDVTEKLQSMCRDMGHLERGLHRLEASRAPGPGGADGVPHIDTQAGWPEVLELVRAMQQDAAQHGARLEALFRMVAAVDRAIALVGATFQKSKVADFLMQGRVPWRRGSPGDSPEEWVKEEEVCFMPPVPPAPGAAGQSLQKDKGELSAEQGIWATLMTLVIMVTAANKERVEEEGGKPKHVLSTSGVQSDAREPGEESQKADVLEGTAERLPPIRASGLGADPAQAVVSPGQGDGVPGPAQAFPGHLPLPTKVEAKAPETPSENLRTGLELAPAPGRVNVVSPSLEVAPGAGQGASSSRPDPEPLEEGTRLTPGPGPQCPGPPGLPAQARATHSGGETPPRAALLKGAVAPGFSRRDLVFPSIFCACLGISIHIQEMDTPGEMLMTGRGSLGPTLTTEAPAAAQPGKQGPPGTGRCLQAPGTEPGEQTPEGARELSPLQESSSPGGVKAEEEQRAGAEPGTRPSLARSDDNDHEVGALGLQQGKSPGAGNPEPEQDCAARAPVRAEAVRRMPPGAEAGSVVLDDSPAPPAPFEHRVVSVKETSISAGYEVCQHEVLGGGRFGQVHRCTEKSTGLPLAAKIIKVKSAKDREDVKNEINIMNQLSHVNLIQLYDAFESKHSCTLVMEYVDGGELFDRITDEKYHLTELDVVLFTRQICEGVHYLHQHYILHLDLKPENILCVNQTGHQIKIIDFGLARRYKPREKLKVNFGTPEFLAPEVVNYEFVSFPTDMWSVGVITYMLLSGLSPFLGETDAETMNFIVNCSWDFDADTFEGLSEEAKDFVSRLLVKEKSCRMSATQCLKHEWLNNLPAKASRSKTRLKSQLLLQKYIAQRKWKKHFYVVTAANRLRKFPTSP

SEQ ID NO: 162 - protein, 2286 aa, Homo sapiens
GEMALFECLVAGPTDVEVDWLCRGRLLQPALLKCKMHFDGRKCKLLLTSVHEDDSGVYTCKLSTAKDELTCSARLTVRPSLAPLFTRLLEDVEVLEGRAARFDCKISGTPPPVVTWTHFGCPMEESENLRLRQDGGLHSLHIAHVGSEDEGLYAVSAVNTHGQAHCSAQLYVEEPRTAASGPSSKLEKMPSIPEEPEQGELERLSIPDFLRPLQDLEVGLAKEAMLECQVTGLPYPTISWFHNGHRIQSSDDRRMTQYRDVHRLVFPAVGPQHAGVYKSVIANKLGKAACYAHLYVTDVVPGPPDGAPQVVAVTGRMVTLTWNPPRSLDMAIDPDSLTYTVQHQVLGSDQWTALVTGLREPGWAATGLRKGVQHIFRVLSTTVKSSSKPSPPSEPVQLLEHGPTLEEAPAMLDKPDIVYVVEGQPASVTVTFNHVEAQVVWRSCRGALLEARAGVYELSQPDDDQYCLRICRVSRRDMGALTCTARNRHGTQTCSVTLELAEAPRFESIMEDVEVGAGETARFAVVVEGKPLPDIMWYKDEVLLTESSHVSFVYEENECSLVVLSTGAQDGGVYTCTAQNLAGEVSCKAELAVHSAQTAMEVEGVGEDEDHRGRRLSDFYDIHQEIGRGAFSYLRRIVERSSGLEFAAKFIPSQAKPKASARREARLLARLQHDCVLYFHEAFERRRGLVIVTELCTEELLERIARKPTVCESEIRAYMRQVLEGIHYLHQSHVLHLDVKPENLLVWDGAAGEQQVRICDFGNAQELTPGEPQYCQYGTPEFVAPEIVNQSPVSGVTDIWPVGVVAFLCLTGISPFVGENDRTTLMNIRNYNVAFEETTFLSLSREARGFLIKVLVQDRLRPTAEETLEHPWFKTQAKGAEVSTDHLKLFLSRRRWQRSQISYKCHLVLRPIPELLRAPPERVWVTMPRRPPPSGGLSSSSDSEEEELEELPSVPRPLQPEFSGSRVSLTDIPTEDEALGTPETGAATPMDWQEQGRAPSQDQEAPSPEALPSPGQEPAAGASPRRGELRRGSSAESALPRAGPRELGRGLHKAASVELPQRRSPGPGATRLARGGLGEGEYAQRLQALRQRLLRGGPEDGKVSGLRGPLLESLGGRARDPRMARAASSEAAPHHQPPLENRGLQKSSSFSQGEAEPRGRHRRAGAPLEIPVARLGARRLQESPSLSALSEAQPSSPARPSAPKPSTPKSAEPSATTPSDAPQPPAPQPAQDKAPEPRPEPVRASKPAPPPQALQTLALPLTPYAQIIQSLQLSGHAQGPSQGPAAPPSEPKPHAAVFARVASPPPGAPEKRVPSAGGPPVLAEKARVPTVPPRPGSSLSSSIENLESEAVFEAKFKRSRESPLSLGLRLLSRSRSEERGPFRGAEEEDGIYRPSPAGTPLELVRRPERSRSVQDLRAVGEPGLVRRLSLSLSQRLRRTPPAQRHPAWEARGGDGESSEGGSSARGSPVLAMRRRLSFTLERLSSRLQRSGSSEDSGGASGRSTPLFGRLRRATSEGESLRRLGLPHNQLAAQAGATTPSAESLGSEASATSGSSAPGESRSRLRWGFSRPRKDKGLSPPNLSASVQEELGHQYVRSESDFPPVFHIKLKDQVLLEGEAATLLCLPAACPAPHISWMKDKKSLRSEPSVIIVSCKDGRQLLSIPRAGKRHAGLYECSATNVLGSITSSCTVAVARVPGKLAPPEVTQTYQDTALVLWKPGDSRAPCTYTLERRVDGESVWHPVSSGIPDCYYNVTHLPVGVTVRFRVACANRAGQGPFSNSSEKVFVRGTQDSSAVPSAAHQEAPVTSRPARARPPDSPTSLAPPLAPAAPTPPSVTVSPSSPPTPPSQALSSLKAVGPPPQTPPRRHRGLQAARPAEPTLPSTHVTPSEPKPFVLDTGTPIPASTPQGVKPVSSSTPVYVVTSFVSAPPAPEPPAPEPPPEPTKVTVQSLSPAKEVVSSPGSSPRSSPRPEGTTLRQGPPQKPYTFLEEKARGRFGVVRACRENATGRTFVAKIVPYAAEGKPRVLQEYEVLRTLHHERIMSLHEAYITPRYLVLIAESCGNRELLCGLSDRFRYSEDDVATYMVQLLQGLDYLHGHHVLHLDIKPDNLLLAPDNALKIVDFGSAQPYNPQALRPLGHRTGTLEFMAPEMVKGEPIGSATDIWGAGVLTYIMLSGRSPFYEPDPQETEARIVGGRFDAFQLYPNTSQSATLFLRKVLSVHPWSRPSLQDCLAHPWLQDAYLMKLRRQTLTFTTNRLKEFLGEQRRRRAEAATRHKVLLRSYPGGP

SEQ ID NO: 163 - protein, 127 aa, Murine sp.
ATDIWGAGVLTYIMLSGYSPFYEPDPQETEARIVGGRFDAFQLYPNTSQSATLFLRKVLSVHPWSRPSLQDCLAHPWLQDAYLMKLRRQTLTFTTNRLKEFLGEQRRRRAEAATRHKVLLRSYPGSP

SEQ ID NO: 164 - protein, 1287 aa, Homo sapiens
MKGGDRAYTRGPSLGWLFAKCCCCFPCRDAYSHSSSENGGKSESVANLQAQPSLNFIHSSPGPKRSTNTLKKWLTSPVRRLNSGKADGNIKKQKKVRDGRKSFDLGSPKPGDETTPQGDSADESKKGWGEDEPDEESHTPLPPPMKIFDNDPTQDEMSSSLLAARQASTEVPTAADLVNAIEKLVKNKLSLEGSSYRGSLKDPAGCLNEGMAPPTPPKNPEEEQKAKALRGRMFVLNELVQTEKDYVKDLGIVVEGFMKRIEEKGVPEDMRGKDKIVFGNIHQIYDWHKDFFLAELEKCIQEQDRLAQLFIKHERKLHIYVWYCQNKPRSEYIVAEYDAYFEEVKQEINQRLTLSDFLIKPIQRITKYQLLLKDFLRYSEKAGLECSDIEKAVELMCLVPKRCNDMMNLGRLQGFEGTLTAQGKLLQQDTFYVIELDAGMQSRTKERRVFLFEQIVIFSELLRKGSLTPGYMFKRSIKMNYLVLEENVDNDPCKFALMNRETSERVVLQAANADIQQAWVQDINQVLETQRDFLNALQSPIEYQRKERSTAVMRSQPARLPQASPRPYSSVPAGSEKPPKGSSYNPPLPPLKISTSNGSPGFEYHQPGDKFEASKNDLGGCNGTSSMAVIKDYYALKENEICVSQGEVVQVLAVNQQNMCLVYQPASDHSPAAEGWVPGSILAPLTKATAAESSDGSIKKSCSWHTLRMRKRAEVENTGKNEATGPRKPKDILGNKVSVKETNSSEESECDDLDPNTSMEILNPNFIQEVAPEFLVPLVDVTCLLGDTVILQCKVCGRPKPTITWKGPDQNILDTDNSSATYTVSSCDSGEITLKICNLMPQDSGIYTCIATNDHGTTSTSATVKVQGVPAAPNRPIAQERSCTSVILRWLPPSSTGNCTISGYTVEYREEGSQIWQQSVASTLDTYLVIEDLSPGCPYQFRVSASNPWGISLPSEPSEFVRLPEYDAAADGATISWKENFDSAYTELNEIGRGRFSIVKKCIHKATRKDVAVKFVNKKMKKKEQAAHEAALLQHLQHPQYITLHDTYESPTSYILILELMDDGRLLDYLMNHDELMEEKVAFYIRDIMEALQYLHNCRVAHLDIKPENLLIDLRIPVPRVKLIDLEDAVQISGHFHIHHLLGNPEFAAPEVIQGIPVSLGTDIWSIGVLTYVMLSGVSPFLDESKEETCINVCRVDFSFPHEYFCGVSNAARDFINVILQEDFRRRPTAATCLQHPWLQPHNGSYSKIPLDTSRLACFIERRKHQNDVRPIPNVKSYIVNRVNQGT

SEQ ID NO: 165 - protein, 514 aa, Homo sapiens
MADSGLDKKSTKCPDCSSASQKDVLCVCSSKTRVPPVLVVEMSQTSSIGSAESLISLERKKEKNINRDITSRKDLPSRTSNVERKASQQQWGRGNFTEGKVPHIRIENGAAIEEIYTFGRILGKGSFGIVIEATDKETETKWAIKKVNKEKAGSSAVKLLEREVNILKSVKHEHIIHLEQVFETPKKMYLVMELCEDGELKEILDRKGHFSENETRWIIQSLASAIAYLHNNDIVHRDLKLENIMVKSSLIDDNNEINLNIKVTDFGLAVKKQSRSEAMLQATCGTPIYMAPEVISAHDYSQQCDIWSIGVVMYMLLRGEPPFLASSEAKLFELIRKGELHFENAVWNSISDCAKSVLKQLMKVDPAHRITAKELLDNQWLTGNKLSSVRPTNVLEMMKEWKNNPESVEENTTEEKNKPSTEEKLKSYQPWGNVPETNYTSDEEEEKQSTAYEKQFPATSKDNFDMCSSSFTSSKLLPAEIKGEMEKTPVTPSQGTATKYPAKSGALSRTKKKL

SEQ ID NO: 166 - protein, 508 aa, Homo sapiens
  MOD_RES (386): Variable amino acid
  MOD_RES (400): Variable amino acid
  MOD_RES (416): Variable amino acid
  MOD_RES (418): Variable amino acid
  MOD_RES (465): Variable amino acid
MQCLAAALKDETNMSGGGEQADILPANYVVKDRWKVLKKIGGGGFGEIYEAMDLLTRENVALKVESAQQPKQVLKMEVAVLKKLQGSGLGQGDGKEEMMKPGAKRGKDHVCRFIGCGRNEKFNYVVMQLQGRNLADLRRSQPRGTFTLSTTLRLGKQILESIEAIHSVGFLHRDIKPSNFAMGRLPSTYRKCYMLDFGLARQYTNTTGDVRPPRNVAGFRGTVRYASVNAHKNREMGRHDDLWSLFYMLVEFAVGQLPWRKIKDKEQVGMIKEKYEHRMLLKHMPSEFHLFLDHIASLDYFTKPDYQLIMSVFENSMKERGIAENEAFDWEKAGTDALLSTSTSTPPPAEHPADGSHVWGGQCDASAWGPAPGEHRGCATGRAPEXPGECTPNSAREALXGAGPQSPPCPPPRGSXGXSLGGDRCQPEQTPDQHRQSNCRQGEGRGWPFLSPPIPSLVPLPCSSXAPCPPPISLLARPLFPVPSPALASLCLPSSSSSVSFTLRRPSA

SEQ ID NO: 167 - protein, 478 aa, Homo sapiens
  MOD_RES (138): Variable amino acid
MSGGGEQLDILSVGILVKERWKVLRKIGGGGFGEIYDALDMLTRENVALKVESAQQPKQVLKMEVAVLKKLQGKDHVCRFIGCGRNDRFNYVVMQLQGRNLADLRRSQSRGTFTISTTLRLGRQILESIESIHSVGSXHRDIKPSNFAMGRFPSTCRKCYMLDFGLARQFTNSCGDVRPPRAVAGFRGTVRYASINAHRNREMGRHDDLWSLFYMLVEFVVGQLPWRKIKDKEQVGSIKERYDHRLMLKHLPPEFSIFLDHISSLDYFTKPDYQLLTSVFDNSIKTFGVIESDPFDWEKTGNDGSLTTTTTSTTPQLHTRLTPAAIGIANATPIPGDLLRENTDEVFPDEQLSDGENGIPVGVSPDKLPGSLGHPRPQEKDVWEEMDANKNKIKLGICKAATEEENSHGQANGLLNAPSLGSPIRVRSEITQPDRDIPLVRKLRSIHSFELEKRLTLEPKPDTDKFLETWYKIVYFSF

SEQ ID NO: 168 - protein, 266 aa, Homo sapiens
TFTIFFEMTVFDLEAKSARGGSNLLMDSVSSFQLFMFQLLRGLAYIHHQHVLHRDLKPQNLLISHLGELKLADFGLARAKSIPSQTYSSEVVTLWYRPPDALLGATEYSSELDIWGAGCIFIEMFQGQPLFPGVSNILEQLEKIWEVLGVPTEDTWPGVSKLPNYNPEWFPLPTPRSLHVVWNRLGRVPEAEDLASQMLKGFPRDRVSAQEALVHDYFSALPSQLYQLPDEESLFTVSGVRLKPEMCDLLASYQKGHHPAQFSKCW

SEQ ID NO: 169 - protein, 247 aa, Homo sapiens
NGVADGVIKSVLWQTLQALNFCHIHNCIHRDIKPENILITKQGIIKICDFGFAQILIPGDAYTDYVATRWYRAPELLVGDTQYGSSVDIWAIGCVFAELLTGQPLWPGKSDVDQLYLIIRTLGKLIPRHQSIFKSNGFFHGISIPEPEDMETLEEKFSDVHPVALNFMKGCLKMNPDDRLTCSQLLESSYFDSFQEAQIKRKARNEGRNRRRQQNQLLPLIPGSHISPTPDGRKQVLQLKFDHLPNI

SEQ ID NO: 170 - protein, 296 aa, Murine sp.
KIALREIRMLKLKHPNLVNLIEVFRRKRKMHLVFEYCDHTLLNELERNPNGVSDGVIKSVLWQTLQALNFCHKHNCIHRDVKPENILITKQGMIKICDFGFARILIPGDAYTDYVATRWYRAPELLVGDTKYGSSVDVWAVGCVFAELLTGQPLWPGKSDVDQLYLIIRTLGKLIPRHQSIFRSNQFFRGISIPEPEDMETLEEKFSNVQPVALSFMKGCLKMNPDERLTCAQLLDSAYFESFQEDQMKRKARSEGRSRRRQQNQLLPLIPGSHISPTPDGRKQVVQLKFDHLPNI

SEQ ID NO: 171 - protein, 1490 aa, Homo sapiens
MPNSERHGGKKDGSGGASGTLQPSSGGGSSNSRERHRLVSKHKRHKSKHSKDMGLVTPEAASLGTVIKPLVEYDDISSDSDTFSDDMAFKLDRRENDERRGSDRSDRLHKHRHHQHRRSRDLLKAKQTEKEKSQEVSSKSGSMKDRISGSSKRSNEETDDYGKAQVAKSSSKESRSSKLHKEKTRKERELKSGHKDRSKSHRKRETPKSYKTVDSPKRRSRSPHRKWSDSSKQDDSPSGASYGQDYDLSPSRSHTSSNYDSYKKSPGSTSRRQSVSPPYKEPSAYQSSTRSPSPYSRRQRSVSPYSRRRSSSYERSGSYSGRSPSPYGRRRSSSPFLSKRSLSRSPLPSRKSMKSRSRSPAYSRHSSSHSKKKRSSSRSRHSSISPVRLPLNSSLGAELSRKKKERAAAAAAAKMDGKESKGSPVFLPRKENSSVEAKDSGLESKKLPRSVKLEKSAPDTELVNVTHLNTEVKNSSDTGKVKLDENSEKHLVKDLKAQGTRDSKPIALKEEIVTPKETETSEKETPPPLPTIASPPPPLPTTTPPPQTPPLPPLPPIPALPQQPPLPPSQPAFSQVPASSTSTLPPSTHSKTSAVSSQANSQPPVQVSVKTQVSVTAAIPHLKTSTLPPLPLPPLLPGGDDMDSPKETLPSKPVKKEKEQRTRHLLTDLPLPPELPGGDLSPPDSPEPKAITPPQQPYKKRPKICCPRYGERRQTESDWGKRCVDKFDIIGIIGEGTYGQVYKARDKDTGELVALKKVRLDNEKEGFPITAIREIKILRQLIHRSVVNMKEIVTDKQDALDFKKDKGAFYLVFEYMDHDLMGLLESGLVHFSEDHIKSFMKQLMEGLEYCHKKNFLHRDIKCSNILLNNSGQIKLADFGLARLYNSEESRPYTNKVITLWYRPPELLLGEERYTPAIDVWSCGCILGELFTKKPIFQANLELAQLELISRLCGSPCPAVWPDVIKLPYFNTMKPKKQYRRRLREEFSFIPSAALDLLDHMLTLDPSKRCTAEQTLQSDFLKDVELSKMAPPDLPHWQDCHELWSKKRRRQRQSGVVVEEPPPSKTSRKETTSGTSTEPVKNSSPAPPQPAPGKVESGAGDAIGLADITQQLNQSELAVLLNLLQSQTDLSIPQMAQLLNIHSNPEMQQQLEALNQSISALTEATSQQQDSETMAPEESLKEAPSAPVILPSAEQMTLEASSTPADMQNILAVLLSQLMKTQEPAGSLEENNSDKNSGPQGPRRTPTMPQEEAAACPPHILPPEKRPPEPPGPPPPPPPPPLVEGDLSSAPQELNPAVTAALLQLLSQPEAEPPGHLPHEHQALRPMEYSTRPRPNRTYGNTDGPETGFSAIDTDERNSGPALTESLVQTLVKNRTFSGSLSHLGESSSYQGTGSVQFPGDQDLRFARVPLALHPVVGQPFLKAEGSSNSVVHAETKLQNYGELGPGTTGASSSGAGLHWGGPTQSSAYGKLYRGPTRVPPRGGRGRGVPY

SEQ ID NO: 172 - protein, 534 aa, Homo sapiens
  MOD_RES (221): Variable amino acid
MEMYETLGKVGEGSYGTVMKCKHKNTGQIVAIKIFYERPEQSVNKIAMREIKFLKQFHHENLVNLIEVFRQKKKIHLVFEFIDHTVLDELQHYCHGLESKRLRKYLFQILRAIDYLHSNNVIIHRDIKPENILVSQSGITKLCDFGFARTLAAPGDIYTDYVATRWYRAPELVLKDTSYGKYVPVDIWALGCMIIEMATGNPYLPSSSDLDLLHKIVLKVXFMPELKAKLLQEAKVNSLIKPKESSKENELRKDERKTVYTNTLLSSSVLGKEIEKEKKPKEIKVRVIKVKGGRGDISEPKKKEYEGGLGQQDANENVHPMSPDTKLVTIEPPNPINPSTNCNGLKENPHCGGSVTMPPINLTNSNLMAANLSSNLFHPSVRLTERAKKRRTSSQSIGQVMPNSRQEDPGPIQSQMEKGIFNERTGHSDQMANENKRKLNFSRSDRKEFHFPELPVTIQSKDTKGMEVKQIKMLKRESKKTESSKIPTLLNVDQNQEKQEFIPLSLLSACCPIFTNICSQLTIRVEMAIARGRI

SEQ ID NO: 173 - protein, 337 aa, Murine sp.
LADIVHACLQIDPAERTSSTDLLRHDYFTRDGFIEKFIPELRAKLLQEAKVNSFIKPKENFKENEPVRDEKKSVFTNTLLYGNPSLYGKEVDRDKRAKELKVRVIKAKGGKGDVPDQKKPEYEGDHRQQGTADDTQPSSLDKKPSVLELTNPLNPSENSDGVKEDPHAGGCMIMPPINLTSSNLLAANLSSNLSHPNSRLTERTKKRRTSSQTIGQTLSNSRQEDTGPTQVQTEKGAFNERTGQNDQISSGNKRKLNFPKCDRKEFHFPELPFTVQAKEMKGMEVKQIKVLKRESKKTDSSKIPTLLSMDPNQEKQEGGDGDCEGKNLKRNRFFFSR

SEQ ID NO: 174 - protein, 211 aa, Murine sp.
SASGQLKIADFGLARVFSPDGGRLYTHQVATRWYRAPELLYGARQYDQGVDLWAVGCIMGELLNGSPLFPGENDIEQLCCVLRILGTPSPRVWPEITELPDYNKISFEEQAPVPLEEVLPDASPQALDLLGQFLLYPPRQRIAASQALLHQYFFTAPLPAHPSELPIPQRPGGPAPKAHPGPPHVHDFHVDRPIEESLLNPELIRPFIPEG

SEQ ID NO: 175 - protein, 499 aa, Homo sapiens
  MOD_RES (177): Variable amino acid
MITSISTEKSGHTHYPFMITTLQYYRGRGGKTAVWRHFSAEGPFAFAEMRHSKRTHCPDWDSRESWGHESYRGSHKRKRRSHSSTQENRHCKPHHQFKESDCHYLEARSLNERDYRDRRYVDEYRNDYCEGYVPRHYHRDIESGYRIHCSKSSVRSRRSSPKRKRNRHCSSHQSRSXEIVDTLGEGAFGKVVECIDHGMDGMHVAVKIVKNVGRYREAARSEIQVLEHLNSTDPNSVFRCVQMLEWFDHHGHVCIVFELLGLSTYDFIKENSFLPFQIDHIRQMAYQICQSINFLHHNKLTHTDLKPENILFVKSDYVVKYNSKMKRDERTLKNTDIKVVDFGSATYDDEHHSTLVSTRHYRAPEVILALGWSQPCDVWSIGCILIEYYLGFTVFQTHDSKEHLAMMERILGPIPQHMIQKTRKRKYFHHNQLDWDEHSSAGRYVRRRCKPLKEFMLCHDEEHEKLFDLVRRMLEYDPTQRITLDEALQHPFFDLLKKK

SEQ ID NO: 176 - protein, 545 aa, Homo sapiens
  MOD_RES (260): Variable amino acid
MCTVVDPRIVRRYLLRRQLGQGRTFREITLLQVSGLGPPVQSPCPGTDLSRQERNWPSWAPEHSPSWPSSRLRLSPQEFGDHPNIISLLDVIRAENDRDIYLVFEFMDTDLNAVIRKGGLLQDVHVRSIFYQLLRATRFLHSGHVVHRDQKPSNVLLDANCTVKLCDFGLARSLGDLPEGPEDQAVTEYVATRWYRAPEVLLSSHRYTASCPRYTLGVDMWSLGCILGEMLRGRPLFPGTSTLHQLELILETIPPPSEEXRPRQTLDALLPPDTSPEALDLLRRLLVFAPDKRLSATQALQHPYVQRFHCPSDEWAREADVRPRAHEGVQLSVPEYRSRVYQMILECGGSSGTSREKGPEGVSPSQAHLHKPRADPQLPSRTPVQGPRPRPQSSPGHDPAEHESPRAAKNVPRQNSAPLLQTALLGNGERPPGAKEAPPLTLSLVKPSGRGAAPSLTSQAAAQVANQALIRGDWNRGGGVRVASVQQVPPRLPPEARPGRRMFSTSALQGAQGGARALLGGYSQAYGTVCHSALGHLPLLEGHHV

SEQ ID NO: 177 - protein, 419 aa, Homo sapiens
MKNYKAIGKIGEGTFSEVMKMQSLRDGNYYACKQMKQRFESIEQVNNLREIQALRRLNPHPNILMLHEVVFDRKSGSLALICELMDMNIYELIRGRRYPLSEKKIMHYMYQLCKSLDHIHRNGIFHRDVKPENILIKQDVLKLGDFGSCRSVYSKQPYTEYISTRWYRAPECLLTDGFYTYKMDLWSAGCVFYEIASLQPLFPGVNELDQISKIHDVIGTPAQKILTKFKQSRAMNFDFPFKKGSGIPLLTTNLSPQCLSLLHAMVAYDPDERIAAHQALQHPYFQEQRKTEKRALGSHRKAGFPEHPVAPEPLSNSCQISKEGRKQKQSLKQEEDRPKRRGPAYVMELPKLKLSGVVRLSSYSSPTLQSVLGSGTNGRVPVLRPLKCIPASKKTDPQKDLKPAPQQCRLPTIVRKGGR

SEQ ID NO: 178 - protein, 632 aa, Homo sapiens [sequence omitted]

SEQ ID NO: 179 - protein, 413 aa, Murine sp.
SSNNGGMSAEEEIGPGAEPMRGPSLATRDWRDETVGTTDLQQGIDPGAVSPEPGKDHAAQGPGRTEAGRVSSAAEAAIVVLDDSAAPPAPFEHRVVSIKDTLISAGYTVSQHEVLGGGRFGQVHRCTERSTGLALAAKIIKVKNVKDREDVKNEVNIMNQLSHVNLIQLYDAFESKNSFTLIMEYVDGGELFDRITDEKYHLTELDVVLFTRQICEGVHYLHQHYILHLDLKPENILCVSQTGHQIKIIDFGLARRYKPREKLKVNFGTPEFLAPEVVNYEFVSFPTDMWSVGVITYMLLSGLSPFLGETDAETMNFIVNCSWDFDADTFKGLSEEAKDFVSRLLVKEKSCRMSATQCLKHEWLNHLPAKASGSNVRLRSQQLLQKYMAQSKWKKHFHVVAAVNRLRKFPTCP

SEQ ID NO: 180 - protein, 253 aa, Homo sapiens
MAAARATTPADGEEPAPEAEALAAARERSSRFLSGLELVKQGAEARVFRGRFQGRAAVIKHRFPKGYRHPALEARLGRRRTVQEARALLRCRRAGISAPVVFFVDYASNCLYMEEIEGSVTVRDYIQSTMETEKTPQGLSNLAKTIGQVLARMHDEDLIHGDLTTSNMLLKPPLEQLNIVLIDFGLSFISALPEDKGVDLYVLEKAFLSTHPNTETVFEAFLKSYSTSSKKARPVLKKLDEVRLRGRKRSMVG

SEQ ID NO: 181 - protein, 462 aa, Homo sapiens
QREKVNQGNMPGLQSTFLAMDTEEGVEVVWNELHFGDRKAFAAHEEKIQTVFEQLVLVDHPNIVKLHKYWLDTSEACARVIFITEYVSSGSLKQFLKKTKKNHKAMNARAWKRWCTQILSALSFLHACSPPIIHGNLTSDTIFIQHNGLIKIGSVWHRIFSNALPDDLRSPIRAEREELRNLHFFPPEYGEVADGTAVDIFSFGMCALEMAVLEIQTNGDTRVTEEAIARARHSLSDPNMREFILCCLARDPARRPSAHSLLFHRVLFEVHSLKLLAAHCFIQHQYLMPENVVEEKTKAMDLHAVLAELPRPRRPPLQWRYSEVSFMELDKFLEDVRNGIYPLMNFAATRPLGLPRVLAPPPEEVQKAKTPTPEPFDSETRKVIQMQCNLERSEDKARWHLTLLLVLEDRLHRQLTYDLLPTDSAQDLASELVHYGFLHEDDRMKLAAFLESTFLKYRGTQA

SEQ ID NO: 182 - protein, 281 aa, Murine sp.
HASAPEYGEVNDGTGFVDIFSFGMCALEMAVLEIQANGDTRVTEEAIARARHSLSDPNMREFILSCLARDPARRPSAHNLLFHRVLFEVHSLKLLAAHCFIQHQYLMPENVVEEKTKAMDLHAVLAEMPQPHGPPMQWRYSEVSFLELDKFLEDVRNGIYPLMNFAAARPLGLPRVLAPPPEEAQKAKTPTPEPFDSETRKVVQMQCNLERSEDKARWHLTLLLVLEDRLHRQLTYDLLPTDSAQDLAAELVHYGFLHEDDRTKLAAFLETTFLKYRGTQA

SEQ ID NO: 183 - protein, 1952 aa, Homo sapiens
  MOD_RES (681): Variable amino acid
MSGGAAEKQSSTPGSLFLSPPAPAPKNGSSSDSSVGEKLGAAAADAVTGRTEEYRRRRHTMDKDSRGAAATTTTTEHRFFRRSVICDSNATALELPGLPLSLPQPSIPAAVPQSAPPEPHREETVTATATSQVAQQPPAAAAPGEQAVAGPAPSTVPSSTSKDRPVSQPSLVGSKEEPPPARSGSGGGSAKEPQEERSQQQDDIEELETKAVGMSNDGRFLKFDIEIGRGSFKTVYKGLDTETTVEVAWCELQDRKLTKSERQRFKEEAEMLKGLQHPNIVRFYDSWESTVKGKKCIVLVTELMTSGTLKTYLKRFKVMKIKVLRSWCRQILKGLQFLHTRTPLIIHRDLKCDNIFITGPTGSVKIGDLGLATLKRASFAKSVIGTPEFMAPEMYEEKYDESVDVYAFGMCMLEMATSEYPYSECQNAAQIYRRVTSGVKPASFDKVAIPEVKEIIEGCIRQNKDERYSIKDLLNHAFFQEETGVRVELAEEDDGEKIAIKLWLRIEDIKKLKGKYKDNEAIEFCFDLERDVPEDVAQEMVESGYVCEGDHKTMAKAIKDRVSLIKRKREQRQLVREEQENKKQEESSLKQQVEQSSASQTGIKQLPSASTGIPTASTTSASVSTQVEPEEPEADQHQQLQYQQPSISVLSDGTVDSGQGSSVFTESRVSSQQTVSYGFPXHEQAHSTGTVPGHIPSTVQAQSQPHGVYPPSSVQQGIQQTAPPQQTVQYSLSQTSTSSEATTAQPVSQPQAPQVLPQVSAGKQSTQGVSQVAPAEPVAVAQPQATQPTTLASSVDSAHSDVASGMSDGNENVPSSSGRHEGRTTKRHYRKSVRSRSRHEKTSRPKLRILNVSNKGDRVVECQLETHNRKMVTFKFDLDGDNPEEIATIMVNNDFILAIERESFVDQVREIIEKADEMLSEDVSVEPEGDQGLESLQGKDDYGFSGSQKLEGEFKQPIPASSMPQQIGIPTSSLTQVVHSAGRRFIVSPVPESRLRESKVFPSEITDTVAASTAQSPGMNLSHSASSLSLQQAFSELRRAQMTEGPNTAPPNFSHTGPTFPVVPPFLSSIAGVPTTAAATAPVPATSSPPNDISTSVIQSEVTVPTEEGIAGVATSTGVVTSGGLPIPPVSESPVLSSVVSSITIPAVVSISTTSPSLQVPTSTSEIVVSSTALYPSVTVSATSASAGGSTATPGPKPPAVVSQQAAGSTTVGATLTSVSTTTSFPSTASQLSIQLSSSTSTPTLAETVVVSAHSLDKTSHSSTTGLAFSLSAPSSSSSPGAGVSSYISQPGGLHPLVIPSVIASTPILPQAAGPTSTPLLPQVPSIPPLVQPVANVPAVQQTLIHSQPQPALLPNQPHTHCPEVDSDTQPKAPGIDDIKTLEEKLRSLFSEHSSSGAQHASVSLETSLVIESTVTPGIPTTAVAPSKLLTSTTSTCLPPTNLPLGTVALPVTPVVTPGQVSTPVSTTTSGVKPGTAPSKPPLTKAPVLPVGTELPAGTLPSEQLPPFPGPSLTQSQQPLEDLDAQLRRTLSPEMITVTSAVGPVSMAAPTAITEAGTQPQKGVSQVKEGPVLATSSGAGVFKMGRFQVSVAADGAQKEGKNKSEDAKSVHFESSTSESSVLSSSSPESTLVKPEPNGITIPGISSDVPESAHKTTASEAKSDTGQPTKVGRFQVTTTANKVGRFSVSKTEDKITDTKKEGPVASPPFMDLEQAVLPAVIPKKEKPELSEPSHLNGPSSDPEAAFLSRDVDDGSGSPHSPHQLSSKSLPSQNLSQSLSNSFNSSYMSSDNESDIEDEDLKLELRRLRDKHLKEIQDLQSRQKHEIESLYTKLGKVPPAVIIPPAAPLSGRRRRPTKSKGSKSSRSSSLGNKSPQLSGNLSGQSAASVLHPQQTLHPPGNIPESGQNQLLQPLKPSPSSDNLYSAFTSDGAISVPSLSAPGQGNKATIIVQKQ

SEQ ID NO: 184 - protein, 535 aa, Homo sapiens
MSEGESQTVLSSGSDPKVESSSSAPGLTSVSPPVTSTTSAASPEEEEESEDESEILEESPCGRWQKRREEVNQRNVPGIDSAYLAMDTEEGVEVVWNEVQFSERKNYKLQEEKVRAVFDNLIQLEHLNIVKFHKYWADIKENKARVIFITEYMSSGSLKQFLKKTKKNHKTMNEKAWKRWCTQILSALSYLHSCDPPIIHGNLTCDTIFIQHNGLIKIGSVAPDTINNHVKTCREEQKNLHFFAPEYGEVTNVTTAVDIYSFGMCALEMAVLEIQGNGESSYVPQEAISSAIQLLEDPLQREFIQKCLQSEPARRPTARELLFHPALFEVPSLKLLAAHCIVGHQHMIPENALEEITKNMDTSAVLAEIPAGPGREPVQTLYSQSPALELDKFLEDVRNGIYPLTAFGLPRPQQPQQEEVTSPVVPPSVKTPTPEPAEVETRKVVLMQCNIESVEEGVKHHLTLLLKLEDKLNRHLSCDLMPNENIPELAAELVQLGFISEADQSRLTSLLEETLNKFNFARNSTLNSAAVTVSS

SEQ ID NO: 185 - protein, 378 aa, Murine sp.
LKQFLKKTKKNHKTMNEKAWKRWCTQILSALSYLHSCDPPIIHGNLTCDTIFIQHNGLIKIGSVAPDTINNHVKTCREEQKNLHFFAPEYGEVTNVTTAVDIYSFGMCALEMAVLEIQGNGESSYVPQEAISSAIQLLEDSLQREFIQKCLQSEPARRPTARELLFHPALFEVPSLKLLAAHCIVGHQHMIPENALEEITKNMDTSAVLAEIPAGPGREPVQTLYSQSPALELDKFLEDVRNGIYPLTAFGLPRPQQPQQEEVTSPVVPPSVKTPTPEPAEVETRKVVLMQCNIESVEEGVKHHLTLLLKLEDKLNRHLSCDLMPNESIPDLAAELVQLGFISEADQSRLTSLLEETLNKFNFTRNSTLNTATVTVSS

SEQ ID NO: 186 - protein, 588 aa, Homo sapiens [sequence omitted]

SEQ ID NO: 187 - protein, 241 aa, Homo sapiens
MQEIPQEQIKEIKKEQLSGSPWILLRENEVSTLYKGEYHRAPVAIKVFKKLQAGSIAIVRQTFNKEIKTMKKFESPNILRIFGICIDETVTPPQFSIVMEYCELGTLRELLDREKDLTLGKRMVLVLGAARGLYRLHHSEAPELHGKIRSSNFLVTQGYQVKLAGFELRKTQTSMSLGTTREKTDRVKSTAYLSPQELEDVFYQYDVKSEIYSFGIVLWEIATGDIPFQGEECEDWLSQWL

SEQ ID NO: 188 - protein, 1171 aa, Homo sapiens
MAPVYEGMASHVQVFSPHTLQSSAFCSVKKLKIEPSSNWDMTGYGSHSKVYSQSKNIPLSQPATTTVSTSLPVPNPSLPYEQTIVFPGSTGHIVVTSASSTSVTGQVLGGPHNLMRRSTVSLLDTYQKCGLKRKSEEIENTSSVQIIEEHPPMIQNNASGATVATATTSTATSKNSGSNSEGDYQLVQHEVLCSMTNTYEVLEFLGRGTFGQVVKCWKRGTNEIVAIKILKNHPSYARQGQIEVSILARLSTESADDYNFVRAYECFQHKNHTCLVFEMLEQNLYDFLKQNKFSPLPLKYIRPVLQQVATALMKLKSLGLIHADLKPENIMLVDPSRQPYRVKVIDFGSASHVSKAVCSTYLQSRYYRAPEIILGLPFCEAIDMWSLGCVIAELFLGWPLYPGDSEYDQIRYISQTQGLPAEYLLSAGTKTTRFFNRDTDSPYPLWRLKTPDDHEAETGIKSKEARKYIFNCLDDMAQVNMTTDLEGSDMLVEKADRREFIDLLKKMLTIDADKRITPIETLNHPFVTMTHLLDFPHSTHVKSCFQNMEICKRRVNMYDTVNQSKTPFITHVAPSTSTNLTMTFNNQLTTVHNQPSAASMAAVAQRSMPLQTGTAQICARPDPFQQALIVCPPGFQGLQASPSKHAGYSVRMENAVPIVTQAPGAQPLQIQPGLLAQQAWPSGTQQILLPPAWQQLTGVATHTSVQHATVIPETMAGTQQLADWRNTHAHGSHYNPIMQQPALLTGHVTLPAAQPLNVGVAHVMRQQPTSTTSSRKSKQHQSSVRNVSTCEVSSSQAISSPQRSKRVKENTPPRCAMVHSSPACSTSVTCGWGDVASSTTRERQRQTIVIPDTPSPTVSVITISSDTDEEEEQKHAPTSTVSKQRKNVISCVTVHDSPYSDSSSNTSPYSVQQRAGHNNANAFDTKGSLENHCTGNPRTIIVPPLKTQASEVLVECDSLVPVNTSHHSSSYKSKSSSNVTSTSGHSSGSSSGAITYRQQRPGPHFQQQQPLNLSQAQQHITTDRTGSHRRQQAYITPTMAQAPYSFPHNSPSHGTVHPHLAAAAAAAHLPTQPHLYTYTAPAALGSTGTVAHLVASQGSARHTVQHTAYPASIVHQVPVSMGPRVLPSPTIHPSQYPAQFAHQTYISASPASTVYTGYPLSPAKVNQYPYI

SEQ ID NO: 189 - protein, 553 aa, Homo sapiens
MMIDETKCPPCSNVLCNPSEPPPPRRLNMTAEQFTGDHTQHFLDGGEMKVEQLFQEFGNRKSNTIQSDGISDSEKCSPTVSQGKSSDCLNTVKSNSSSKAPKVVPLTPEQALKQYKHHLTAYEKLEIINYPEIYFVGPNAKKRHGVIGGPNNGGYDDADGAYIHVPRDHLAYRYEVLKIIGKGSFGQVARVYDHKLRQYVALKMVRNEKRFHRQAAEEIRILEHLKKQDKTGSMNVIHMLESFTFRNHVCMAFELLSIDLYELIKKNKFQGFSVQLVRKFAQSILQSLDALHKNKIIHCDLKPENILLKHHGRSSTKVIDFGSSCFEYQKLYTYIQSRFYRAPEIILGSRYSTPIDIWSFRCILAELLTGQPLFPGEDEGDQLACMMELLGMPPPKLLEQSKRAKYFINSKGIPRYCSVTTQADGRVVLVGGRSRRGKKRGPPGSKDWGTALKGCDDYLFIEFLKRCLHWDPSARLTPAQALRHPWISKSVPRPLTTIDKVSGKRVVNPASAFQGLGSKLPPVVGIANKLKANLMSETNGSIPLCSVLPKLIS

SEQ ID NO: 190 - protein, 168 aa, Murine sp.
TRPELLGMPPQKLLEQSKRAKYFINSKGLPRYCSVSTQTDGRVVLLGGRSRRGKKRGPPGSKDWATALKGCGDYLFIEFLKRCLQWDPSARLTPAQALRHPWISKSTPKPLTMDKVPGKRVVNPTNAFQGLGSKLPPVVGIASKLKANLMSETSGSIPLCSVLPKLIS

SEQ ID NO: 191 - protein, 1649 aa, Homo sapiens [sequence omitted]

SEQ ID NO: 192 - protein, 630 aa, Homo sapiens [sequence omitted]

SEQ ID NO: 193 - protein, 253 aa, Homo sapiens; identical to SEQ ID NO: 180

SEQ ID NO: 194 - protein, 216 aa, Murine sp.
LVQQGAEARVFRGRFQGRAAVVKHRFPKSYRHPELEARLGRRRTVQEARALLRCRRAGIAAPVVFFVDYASNCLYMEEIEDSVTVRDYIQSTMETEKDPQCLLDLARRMGQVLAGMHDQDLIHGDLTTSNMLLRRPLAQLHIVLIDFGLSFVSGLPEDKGVDLYVLEKAFLSTHPHTETAFEAFLKSYGASSKKSSPVLKKLDEVRLRGRKRSMVG

SEQ ID NO: 195 - protein, 596 aa, Homo sapiens
MAGNCGARGALSAHTLLFDLPPALLGELCAVLDSCDGALGWRGLAERLSSSWLDVRHIEKYVDQGKSGTRELLWSWAQKNKTIGDLLQVLQEMGHRRAIHLITNYGAVLSPSEKSYQEGGFPNILFKETANVTVDNVLIPEHNEKGVLLKSSISFQNIIEGTRNFHKDFLIGEGEIFEVYRVEIQNLTYAVKLFKQEKKMQCKKHWKRFLSELEVLLLFHHPNILELAAYFTETEKFCLIYPYMRNGTLFDRLQCVGDTAPLPWHIRIGILIGISKAIHYLHNVQPCSVICGSISSANILLDDQFQPKLTDFAMAHFRSHLEHQSCTINMTSSSSKHLWYMPEEYIRQGKLSIKTDVYSFGIVIMEVLTGCRVVLDDPKHIQLRDLLRELMEKRGLDSCLSFLDKKVPPCPRNFSAKLFCLAGRCAATRAKLRPSMDEVLNTLESTQASLYFAEDPPTSLKSFRCPSPLFLENVPSIPVEDDESQNNNLLPSDEGLRIDRMTQKTPFECSQSEVMFLSLDKKPESKRNEEACNMPSSSCEESWFPKYIVPSQDLRPYKVNIDPSSEAPGHSCRSRPVESSCSSKFSWDEYEQYKKE

SEQ ID NO: 196 - protein, 392 aa, Murine sp.
MWKRFLSELEVLLLFRHPHILELAAYFTETEKLCLVYPYMSNGTLFDRLQCTNGTTPLSWHVRISVLIGIAKAIQYLHNTQPCAVICGNVSSANILLDDQLQPKLTDFAAAHFRPNLEQQSSTINMTGGGRKHLWYMPEEYIRQGRLSVKTDVYSFGIVIMEVLTGCKVVLDDPKHVQLRDLLMELMEKRGLDSCLSFLDRKIPPCPRNFSAKLFSLAGRCVATKAKLRPTMDEVLSSLESTQPSLYFAEDPPTSLKSFRCPSPLFLDNVPSIPVEDDENQNNHSVPPKEVLGTDRVTQKTPFECSQSEVTFLGLDRNRGNRGSEADCNVPSSSHEECWSPELVAPSQDLSPTVISLGSSWEVPGHSYGSKPMEKRCSSGLFCSEHEQSKKQ

SEQ ID NO: 197 - protein, 922 aa, Homo sapiens
MASAVRGSRPWPRLGLQLQFAALLLGTLSPQVHTLRPENLLLVSTLDGSLHALSKQTGDLKWTLRDDPVIEGPMYVTEMAFLSDPADGSLYILGTQKQQGLMKLPFTIPELVHASPCRSSDGVFYTGRKQDAWFVVDPESGETQMTLTTEGPSTPRLYIGRTQYTVTMHDPRAPALRWNTTYRRYSAPPMDGSPGKYMSHLASCGMGLLLTVDPGSGTVLWTQDLGVPVMGVYTWHQDGLRQLPHLTLARDTLHFLALRWGHIRLPASGPRDTATLFSTLDTQLLMTLYVGKDETGFYVSKALVHTGVALVPRGLTLAPADGPTTDEVTLQVSGEREGSPSTAVRYPSGSVALPSQWLLIGHHELPPVLHTTMLRVHPTLGSGTAETRPPENTQAPAFFLELLSLSREKLWDSELHPEEKTPDSYLGLGPQDLLAASLTAVLLGGWILFVMRQVVEKQQETPLAPADFAHISQDAQSLHSGASRRSQKRLQSPSKQAQPLDDPEAEQLTVVGKISFNPKDVLGRGAGGTFVFRGQFEGRAVAVKRLLRECFGLVRREVQLLQESDRHPNVLRYFCTERGPQFHYIALELCRASLQEYVENPDLDRGGLEPEVVLQQLMSGLAHLHSLHIVHRDLKPGNILITGPDSQGLGRVVLSDFGLCKKLPAGRCSFSLHSGIPGTEGWMAPELLQLLPPDSPTSAVDIFSAGCVFYYVLSGGSHPFGDSLYRQANILTGAPCLAHLEEEVHDKVVARDLVGAMLSPLPQPRPSAPQVLAHPFFWSRAKQLQFFQDVSDWLEKESEQEPLVRALEAGGCAVVRDNWHEHISMPLQTDLRKFRSYKGTSVRDLLRAVRNKKHHYRELPVEVRQALGQVPDGFVQYFTNRFPRLLLHTHRAMRSCASESLFLPYYPPDSEARRPCPGATGR

SEQ ID NO: 198 - protein, 322 aa, Homo sapiens
MEGISNFKTPSKLSEKKKSVLCSTPTINIPASPFMQKLGFGTGVNVYLMKRSPRGLSHSPWAVKKINPICNDHYRSVYQKRLMDEAKILKSLHHPNIVGYRAFTEANDGSLCLAMEYGGEKSLNDLIEERYKASQDPFPAAIILKVALNMARGLKYLHQEKKLLHGDIKSSNVVIKGDFETIKICDVGVSLPLDENMTVTDPEACYIGTEPWKPKEAVEENGVITDKADIFAFGLTLWEMMTLSIPHINLSNDDDDEDKTFDESDFDDEAYYAALGTRPPINMEELDESYQKVIELFSVCTNEDPKDRPSAAHIVEALETDV

SEQ ID NO: 199 - protein, 280 aa, Murine sp.
SPRGLSHSPWAVKKISLLCDDHYRTVYQKRLTDEAKILKNLNHPNIIGYRAFTEASDGSLCLAMEYGGEKSLNDLIEERNKDSGSPFPAAVILRVALHMARGLKYLHQEKKLLHGDIKSSNVVIKGDFETIKICDVGVSLPLDENMTVTDPEACYIGTEPWKPKEALEENGIITDKADVFAFGLTLWEMMTLCIPHVNLPDDDVDEDATFDESDFDDEAYYAALGTRPSINMELDDSYQKAIELFCVCTNEDPKDRPSAAHIVEALELDGQCCGLSESKH

SEQ ID NO: 200 - protein, 41 aa, Murine sp.
LLDSDLYLPWTVRVKLAYGIAVGLSYLHFKGIFHRDLTSKV

SEQ ID NO: 201 - protein, 800 aa, Homo sapiens
MSSLGASFVQIKFDDLQFFENCGGGSFGSVYRAKWISQDKEVAVKKLLKIEKEAEILSVLSHRNIIQFYGVILEPPNYGIVTEYASLGSLYDYINSNRSEEMDMDHIMTWATDVAKGMHYLHMEAPVKVIHRDLKSRNVVIAADGVLKICDFGASRFHNHTTHMSLVGTFPWMAPEVIQSLPVSETCDTYSYGVVLWEMLTREVPFKGLEGLQVAWLVVEKNERLTIPSSCPRSFAELLHQCWEADAKKRPSFKQIISILESMSNDTSLPDKCNSFLHNKAEWRCEIEATLERLKKLERDLSFKEQELKERERRLKMWEQKLTEQSNTPLLPSFEIGAWTEDDVYCWVQQLVRKGDSSAEMSVYASLFKENNITGKRLLLLEEEDLKDMGIVSKGHIIHFKSAIEKLTHDYINLFHFPPLIKDSGGEPEENEEKIVNLELVFGFHLKPGTGPQDCKWKMYMEMDGDEIAITYIKDVTFNTNLPDAEILKMTKPPFVMEKWIVGIAKSQTVECTVTYESDVRTPKSTKHVHLIQWSRTKPQDEVKAVQLAIQTLFTNSDGNPGSRSDSSADCQWLDTLRMRQIASNTSLQRSQSNPILGSPFFSHFDGQDSYAAAVRRPQVPIKYQQITPVNQSRSSSPTQYGLTKNFSSLHLNSRDSGFSSGNTDTSSERGRYSDRSRNKYGRGSISLNSSPRGRYSGKSQHSTPSRGRYPGKFYRVSQSALNPHQSPDFKRSPRDLHQPNTIPGMPLHPETDSRASEEDSKVSEGGWTKVEYRKKPHRPSPAKTNKERARGDHRGWRNF

SEQ ID NO: 202 - protein, 835 aa, Homo sapiens
MGNYKSRPTQTCTDEWKKKVSESYVITIERLEDDLQIKEKELTELRNIFGSDEAFSKVNLNYRTENGLSLLHLCCICGGKKSHIRTLMLKGLRPSRLTRNGFTALHLAVYKDNAELITSLLHSGADIQQVGYGGLTALHIATIAGHLEAADVLLQHGANVNIQDAVFFTPLHIAAYYGHEQVTRLLLKFGADVNVSGEVGDRPLHLASAKGFLNIAKLLMEEGSKADVNAQDNEDHVPLHFCSRFGHHDIVKYLLQSDLEVQPHVVNIYGDTPLHLACYNGKFEVAKEIIQISGTESLTKENIFSETAFHSACTYGKSIDLVKFLLDQNVININHQGRDGHTGLHSACYHGHIRLVQFLLDNGADMNLVACDPSRSSGEKDEQTCLMWAYEKGHDAIVTLLKHYKRPQDELPCNEYSQPGGDGSYVSVPSPLGKIKSMTKEKADILLLRAGLPSHFHLQLSEIEFHEIIGSGSFGKVYKGRCRNKIVAIKRYRANTYCSKSDVDMFCREVSILCQLNHPCVIQFVGACLNDPSQFAIVTQYISGGSLFSLLHEQKRILDLQSKLIIAVDVAKGMEYLHNLTQPIIHRDLNSHNILLYEDGHAVVADFGESRFLQSLDEDNMTKQPGNLRWMAPEVFTQCTRYTIKADVFSYALCLWEILTGEIPFAHLKPAAAAADMAYHHIRPPIGYSIPKPISSLLIRGWNACPEGRPEFSEVVMKLEECLCNIELMSPASSNSSGSLSPSSSSDCLVNRGGPGRSHVAALRSRFELEYALNARSYAALSQSAGQYSSQGLSLEEMKRSLQYTPIDKYGYVSDPMSSMHFHSCRNSSSFEDSS

SEQ ID NO: 203 - protein, 634 aa, Homo sapiens
MESERSPLYRQLIDLGYLSSSHWNCGAPGQDTKAQSMLVEQSEKLRHLSTFSHQVLQTRLVDAAKALNLVHCHCLDIFINQAFDMQRDLQITPKRLEYTRKKENELYESLMNIANRKQEEMKDMIVETLNTMKEELLDDATNMEFKDVIVPENGEPVGTREIKCCIRQIQELIISRLNQAVANKLISSVDYLRESFVGTLERCLQSLEKSQDVSVHITSNYLKQILNAAYHVEVTFHSGSSVTRMLWEQIKQIIQRITWVSPPAITLEWKRKVAQEAIESLSASKLAKSICSQFRTRLNSSHEAFAASLRQLEAGHSGRLEKTEDLWLRVRKDHAPRLARLSLESRSLQDVLLHRKPKLGQELGRGQYGVVYLCDNWGGHFPCALKSVVPPDEKHWNDLALEFHYMRSLPKHERLVDLHGSVIDYNYGGGSSIAVLLIMERLHRDLYTGLKAGLTLETRLQIALDVVEGIRFLHSQGLVHRDIKLKNVLLDKQNRAKITDLGFCKPEAMMSGSIVGTPIHMAPELFTGKYDNSVDVYAFGILFWYICSGSVKLPEAFERCASKDHLWNNVRRGARPERLPVFDEECWQLMEACWDGDPLKRPLLGIVQPMLQGIMNRLCKSNSEQPNRGLDDST

SEQ ID NO: 204 - protein, 289 aa, Murine sp.
DVNLKASKASDVYSFGILVWAVLAGREAELVDKTSLIRETVCDRQSRPPLTELPPGSPETPGLEKLKELMIHCWGSQSENRPSFQDCEPKTNEVYNLVKDKVDAAVSEVKHYLSQHRSSGRNLSAREPSQRGTEMDCPRETMVSKMLDRLHLEEPSGPVPGKCPERQAQDTSVGPATPARTSSDPVAGTPQIPHTLPFRGTTPGPVFTETPGPHPQRNQGDGRHGTPWYPWTPPNPMTGPPALVFNNCSEVQIGNYNSLVAPPRTTASSSAKYDQAQFGRGRGWQPFHK

SEQ ID NO: 205 - protein, 688 aa, Homo sapiens
MGSENSALKSYTLREPPFTLPSGLAVYPAVLQDGKFASVFVYKRENEDKVNKAAKHLKTLRHPCLLRFLSCTVEADGIHLVTERVQPLEVALETLSSAEVCAGIYDILLALIFLHDRGHLTHNNVCLSSVFVSEDGHWKLGGMETVCKVSQATPEFLRSIQSIRDPASIPPEEMSPEFTTLPECHGHARDAFSFGTLVESLLTILNEQVSADVLSSFQQTLHSTLLNPIPKCRPALCTLLSHDFFRNDFLEVVNFLKSLTLKSEEEKTEFFKFLLDRVSCLSEELIASRLVPLLLNQLVFAEPVAVKSFLPYLLGPKKDHAQGETPCLLSPALFQSRVIPVLLQLFEVHEEHVRMVLLSHIEAYVEHFTQEQLKKVILPQVLLGLRDTSDSIVAITLHSLAVLVSLLGPEVVVGGERTKIFKRTAPSFTKNTDLSLEGDPFSQPIKFPINGLSDVKNTSEDSENFPSSSKKSEEWPDWSEPEEPENQTVNIQIWPREPCDDVKSQCTTLDVEESSWDDCEPSSLDTKVNPGGGITATKPVTSGEQKPIPALLSLTEESMPWKSSLPQKISLVQRGDDADQIEPPKVSSQERPLKVPSELGLGEEFTIQVKKKPVKDPEMDWFADMIPEIKPSAAFLILPELRTEMVPKKDDVSPVMQFSSKFAAAEITEGEAEGWEEEGELNWEDNNW

SEQ ID NO: 206 - protein, 505 aa, Homo sapiens
MESMLNKLKSTVTKVTADVTSAVMGIPVTREFDVGRHIASGCNGLAWKIFNGTKKSTKQEVAVFVFDKKLIDKYQKFEKDQIIDSLKRGVQQLTRLRHPRLLTVQHPLEESRDCLAFCTEPVFASLANVLGNWENLPSPISPDIKDYKLYDVETKYGLLQVSEGLSFLHSSVKMVHGNITPENIILNKSGAWKIMGFDFCVSSTNPSEQEPKFPCKEWDPNLPSLCLPNPEYLAPEYILSVSCETASDMYSLGTVMYAVFNKGKPIFEVNKQDIYKSFSRQLDQLSRLGSSSLTNIPEEVREHVKLLLNVTPTVRPDADQMTKIPFFDDVGAVTLQYFDTLFQRDNLQKSQFFKGLPKVLPKLPKRVIVQRILPCLTSEFVNPDMVPFVLPNVLLIAEECTKEEYVKLILPELGPVFKQQEPIQILLIFLQKMDLLLTKTPPDEIKNSVLPMVYRALEAPSIQIQELCLNIIPTFANLIDYPSMKNALIPRIKNACYKHLPLRFV

SEQ ID NO: 207 - protein, 808 aa, Homo sapiens
MWFFARDPVRDFPFELIPEPPEGGLPGPWALHRGRKKATGSPVSIFVYDVKPGAEEQTQVAKAAFKRFKTLRHPNILAYIDGLETEKCLHVVTEAVTPLGIYLKARVEAGGLKELEISWGLHQIVKALSFLVNDCSLIHNNVCMAAVFVDRAGEWKLGGLDYMYSAQGNGGGPPRKGIPELEQYDPPELADSSGRVVREKWSADMWRLGCLIWEVFNGPLPRAAALRNPGKIPKTLVPHYCELVGANPKVRPNPARFLQNCRAPGGFMSNRFVETNLFLEEIQIKEPAEKQKFFQELSKSLDAFPEDFCRHKVLPQLLTAFEFGNAGAVVLTPLFKVGKFLSAEEYQQKIIPVVVKMFSSTDRAMRIRLLQQMEQFIQYLDEPTVNTQIFPHVVHGFLDTNPAIREQTVKSMLLLAPKLNEANLNVELMKHFARLQAKDEQGPIRCNTTVCLGKIGSYLSASTRHRVLTSAFSRATRDPFAPSRVAGVLGFAATHNLYSMNDCAQKILPVLCGLTVDPEKSVRDQAFKAIRSFLSKLESVSEDPTQLEEVEKDVHAASSPGMGGAAASWAGWAVTGVSSLTSKLIRSHPTTAPTETNIPQRPTPEGVPAPAPTPVPATPTTSGHWETQEEDKDTAEDSSTADRWDDEDWGSLEQEAESVLAQQDDWSTGGQVSRASQVSNSDHKSSKSPESDWSSWEAEGSWEQGWQEPSSQEPPPDGTRLASEYNWGGPESSDKGDPFATLSARPSTQPRPDSWGEDNWEGLETDSRQVKAELARKKREERRREMEAKRAERKVAKGPMKLGARKLD

SEQ ID NO: 208 - protein, 649 aa, Homo sapiens [sequence omitted]

SEQ ID NO: 209 - protein, 533 aa, Homo sapiens
MSASTGGGGDSGGSGGSSSSSQASCGPESSGSELALATPVPQMLQGLLGSDDEEQEDPKDYCKGGYHPVKIGDVFNGRYHVVRKLGWGHFSTVWLCWDIQRKRFVALKVVKSAGHYTETAVDEIKLLKCVRDSDPSDPKRETIVQLIDDFRISGVNGVHVCMVLEVLGHQLLKWIIKSNYQGLPVPCVKSIVRQVLHGLDYLHTKCKIIHTDIKPENILLCVGDAYIRRLAAEATEWQQAGAPPPSRSIVSTAPQEVLTGKLSKNKRKKMRRKRKQQKRLLEERLRDLQRLEAMEAATQAEDSGLRLDGGSGSTSSSGFSGSLFSPASCSILSGSSNQRETGGLLSPSTPFGASNLLVNPLEPQNADKIKIKIADLGNACWVHKHFTEDIQTRQYRAVEVLIGAEYGPPADIWSTACMAFELATGDYLFEPHSGEDYSRDEDHIAHIVELLGDIPPAFALSGRYSREFFNRRGELRHIHNLKHWGLYEVLMEKYEWPLEQATQFSAFLLPMMEYIPEKRASAADCLQHPWLNP

SEQ ID NO: 210 - protein, 268 aa, Homo sapiens
MEDFLLSNGYQLGKTIGEGTYSKVKEAFSKKHQRKVAIKVIDKMGGPSEFIQRFLPRELQIVRTLDHKNIIQVYEMLESADGKICLVMELAEGGDVFDCVLNGGPLPESRAKALFRQMVEAIRYCHGCGVAHRDLKCENALLQGFNLKLTDFGFAKVLPKSHRELSQTFCGSTAYAAPEVLQGIPHDSKKGDVWSMGVVLYVMLCASLPFDDTDIPKMLWQQQKGVSFPTHLSISADCQDLLKRLLEPDMILRPSIEEVSWHPWLAST

SEQ ID NO: 211 - protein, 268 aa, Murine sp.
MEDFLLSNGYQLGKTIGEGTYSKVKEAFSKKHQRKVAIKIIDKMGGPEEFIQRFLPRELQIVRTLDHKNIIQVYEMLESADGKIYLVMELAEGGDVFDCVLNGGPLPESRAKALFRQMVEAIRYCHGCGVAHRDLKCENALLQGFNLKLTDFGFAKVLPKSRRELSQTFCGSTAYAAPEVLQGIPHDSKKGDVWSMGVVLYVMLCASLPFDDTDIPKMLWQQQKGVSFPTHLGISTECQDLLKRLLEPDMILRPSIEEVSWHPWLAST

SEQ ID NO: 212 - protein, 292 aa, Homo sapiens
  MOD_RES (185): Variable amino acid
MGKGDVLEAAPTTTAYHSLMDEYGYEVGKAIGHGSYGSVYEAFYTKQKVMVAVKIISKKKASDDYLNKFLPREIQQVMKVLRHKYLINFYRAIESTSRVYIILELAQGGDVLEWIQRYGACSEPLAGKWFSQLTLGIAYLHSKSIVHRDLKLENLLLDKWENVKISDFGFAKMVPSNQPVGCSPXYRQVNCFSHLSQTYCGSFAYACPEILRGLPYNPFLSDTWSMGVILYTLVVAHLPFDDTNLKKLLRETQKEVTFPANHTISQECKVQLLIACVAQWRKTQARPLSPLL

SEQ ID NO: 213 - protein, 358 aa, Homo sapiens
MDDATVLRKKGYIVGINLGKGSYAKVKSAYSERLKFNVAVKIIDRRKTPTDFVERFLPREMDILATVNHGSIIKTYEIFETSDGRIYIIMELGVQGDLLEFIKCQGALHEDVARKMFRQLSSAVKYCHDLDIVHRDLKCENLLLDKDFNIKLSDFGFSKRCLRDSNGRIILSKTFCGSAAYAAPEVLQSIPYQPKVYDIWSLGVILYIMVCGSMPYDDSDIRKMLRIQKEHRVDFPRSKNLTCECKDLIYRMLQPDVSQRLHIDEILSHSWLQPPKPKATSSASFKREGEGKYRAECKLDTKTGLRPDHRPDHKLGAKTQHRLLVVPENENRMEDRLAETSRAKDHHISGAEVGKAST

SEQ ID NO: 214 - protein, 273 aa, Homo sapiens
MSGDKLLSELGYKLGRTIGEGSYSKVKVATSKKYKGTVAIKVVDRRRAPPDFVNKFLPRELSILRGVRHPHIVHVFEFIEVCNGKLYIVMEAAATDLLQAVQRNGRIPGVQARDLFAQIAGAVRYLHDHHLVHRDLKCENVLLSPDERRVKLTDFGFGRQAHGYPDLSTTYCGSAAYASPEVLLGIPYDPKKYDVWSMGVVLYVMVTGCMPFDDSDIAGLPRRQKRGVLYPEGLELSERCKALIAELLQFSPSARPSAGQVARNCWLRAGDSG

SEQ ID NO: 215 - protein, 216 aa, Homo sapiens
  MOD_RES (164): Variable amino acid
VGRQETGVRRWAFLICQPISPPLTSSEFIQRFLPRELQIVRTLDHKNIIQVYEMLESADGKICLVMELAEGGDVFDCVLNGGPLPESRAKALFRQMVEAIRYCHGCGVAHRDLKCENALLQGFNLKLTDFGFAKVLPKSHRELSQTFCGSTAYAAPEVLQGIPXKMLWQQQKGVSFPTHLSISADCQDLLKRLLEPDMILRPSIEEVSWHPWLAST

SEQ ID NO: 216 - protein, 333 aa, Homo sapiens
YSLLAEIGRGSYGVVYEAVAGRSGARVAVKKIRCDAPENVELALAEFWALTSLKRRHQNVVQFEECVLQRNGLAQRMSHGNKSSQLYLRLVETSLKGERILGYAEEPCYLWFVMEFCEGGDLNQYVLSRRPDPATNKSFMLQLTSAIAFLHKNHIVHRDLKPDNILITERSGTPILKVADFGLSKVCAGLAPRGKEGNQDNKNVNVNKYWLSSACGSDFYMAPEVWEGHYTAKADIFALGIIIWAMIERITFIDSETKKELLGTYIKQGTEIVPVGEALLENPKMELHIPQKRRTSMSEGIKQLLKDMLAANPQDRPDAFELETRMDQVTCAA

SEQ ID NO: 217 - protein, 412 aa, Murine sp.
PLLLPPPPAAMETGKENGARRGTKSPERKRRSPVQRVLCEKLRPAAQAMDPAGAEVPGEAFLARRRPDGGGGDVPARPRYSLLAEIGRGSYGVVYEAVAGRSGARVAVKKIRCDAPENVELALAEFWALTSLKRRHQNIVQFEECVLQRNGLAQRMSHGNKNSQLYLRLVETSLKGERILGYAEEPCYLWFVMEYCEGGDLNQYVLSRRPDPATNKSFMLQLTSAIAFLHKNHIVHRDLKPDNILITERSGTPILKVADFGLSKVCAGLAPRGKEGNQDNKNVNVNKYWLSSACGSDFYMAPEVWEGHYTAKADIFALGIIIWAMIERITFIDSETKKELLGTYIKQGTEIVPVGEALLENPKMELHIPQKRRTSMSEGVKQLLKDMLAANPQDRPDAFELETRMDQVTCAA

SEQ ID NO: 218 - protein, 341 aa, Homo sapiens
MVSSQPKYDLIREVGRGSYGVVYEAVIRKTSARVAVKKIRCHAPENVELALREFWALSSIKSQHPNVIHLEECILQKDGMVQKMSHGSNSSLYLQLVETSLKGEIAFDPRSAYYLWFVMDFCDGGDMNEYLLSRKPNRKTNTSFMLQLSSALAFLHKNQIIHRDLKPDNILISQTRLDTSDLEPTLKVADFGLSKVCSASGQNPEEPVSVNKCFLSTACGTDFYMAPEVWEGHYTAKADIFALGIIIWAMLERITFIDTETKKELLGSYVKQGTEIVPVGEALLENPKMELLIPVKKKSMNGRMKQLIKEMLAANPQDRPDAFELELRLVQIAFKDSSWET

SEQ ID NO: 219 - protein, 481 aa, Homo sapiens
MRAAFPAGGAGGSVEPPSARPAPQPAGTAARSEEAPARAQAAGMAGPGWGPPRLDGFILTERLGSGTYATVYKAYAKKDTREVVAIKCVAKKSLNKASVENLLTEIEILKGIRHPHIVQLKDFQWDSDNIYLIMEFCAGGDLSRFIHTRRILPEKVARVFMQQLASALQFLHERNISHLDLKPQNILLSSLEKPHLKLADFGFAQHMSPWDEKHVLRGSPLYMAPEMVCQRQYDARVDLWSMGVILYEALFGQPPFASRSFSELEEKIRSNRVIELPLRPLLSRDCRDLLQRLLERDPSRRISFQDFFAHPWVDLEHMPSGESLGRATALVVQAVKKDQEGDSAAALSLYCKALDFFVPALHYEVDAQRKEAIKAKVGQYVSRAEELKAIVSSSNQALLRQGTSARDLLREMARDKPRLLAALEVASAAMAKEEAAGGEQDALDLYQHSLGELLLLLRSPRAGGGSCFTLRFRTSWPELNT

SEQ ID NO: 220 - protein, 565 aa, Homo sapiens
  MOD_RES (75): Variable amino acid
MENFILYEEIGRGSKTVVYKGRRKGTINFVAILCTDKCRRPEITNWVRLTREIKHKNIVTFHEWYETSNHLWLVXENLPEDVVREFGIDLISGLHHLHKLGILFCDISPRKILLEGPGTLKFSNFCLAKVEGENLEEFFALVAAEEGGGDNGENVLKKSMKSRVKGSPVYTAPEVVRGADFSISSDLWSLGCLLYEMFSGKPPFFSESVSELTEKILCEDPLPPIPKDSSRPKASSDFINLLDGLLQRDPQKRLTWTRLLQHSFWKKAFAGADQESSVEDLSLSRNTMECSGPQDSKELLQNSQSRQAKGHKSGQPLGHSFRLENPTEFRPKSTLEGQLNESMFLLSSRPTPRTSTAVEVSPGEDMTHCSPQKTSPLTKITSGHLSQQDLESQMRELIYTDSDLVVTPIIDNPKIMKQPPVKFDAKILHLPTYSVDKLLFLKDQDWNDFLQQVCSQIDSTEKSMGASRAKLNLLCYLCVVAGHQEVATRLLHSPLFQLLIQHLRIAPNWDIRAKVAHVIGLLASHTTELQENTPVVETTSSIGIGILNCLVQHSTPVPRQCLVYV

SEQ ID NO: 221 - protein, 39 aa, Homo sapiens
SLAHVLRARQILTEPEVRDYLRGLVSGLRYLHQRCILHR

SEQ ID NO: 222 - protein, 349 aa, Murine sp.
MGQQHGTRNGLTHRELPRGVGLLLAMALMNVALYLCLDQLFISPGRSTADSRRCPPGYFRMGRMRNCSRWLSCEELRTEVRQLKRVGEGAVKRVFLSEWKEHKVALSRLTRLEMKEDFLHGLQMLKSLQSEHVVTLVGYCEEDGTILTEYHPLGSLSNLEETLNLSKYQDVNTWQHRLQLAMEYVSIINYLHHSPLGTRVMCDSNDLPKTLSQYLLTSNFSIVANDLDALPLVDHDSGVLIKCGHRELHGDFVAPEQLWPYGEDTPFQDDLMPSYNEKVDIWKIPDVSSFLLGHVEGSDMVRFHLFDIHKACKSQIPAERPTAQNVLDAYQRVFHSLRDTVMSQTKEML

SEQ ID NO: 223 - protein, 704 aa, Homo sapiens
EVVAVQMMVECMDDHYASQALEELMPLLKLRHAHISVYQELFITWNGEISSLYLCLVMEFNELSFQEVIEDKRKAKKIIDSEWMQNVLGQVLDALEYLHHLDIIHRNLKPSNIILISSDHCKLQDLSSNVLMTDKAKWNIRAEEDPFRKSWMAPEALNFSFSQKSDIWSLGCIILDMTSCSFMDGTEAMHLRKSLRQSPGSLKAVLKTMEEKQIPDVETFRNLLPLMLQIDPSDRITIKDVVHITFLRGSFKSSCVSLTLHRQMVPASITDMLLEGNVASILGDAGDTKGERALKLLSMALASYCLVPEGSLFMPLALLHMHDQWLSCDQDRVPGKRDFASLGKLGKLLGPIPKGLPWPPELVEVVVTTMELHDRVLDVQLCACSLLLHLLGQALVHHPEAKAPCNQAITSTLLSALQSHPEEEPLLVMVYSLLAITTTQESESLSEELQNAGLLEHILEHLNSSLESRDVCASGLGLLWALLLDDPILALQRPRKKRAPNHGKPGKPKNPASTQSIIVNKAPLEKVPDLISQVLATYPADGEMAEASCGVFWLLSLLGCIKEQQFEQVVALLLQSIRLCQDRALLVNNAYRGLASLVKVSELAAFKVVVQEEGGSGLSLIKETYQLHRDDPEVVENVGMLLVHLASYEEILPELVSSSMKALLQEIKERFTSSLVSDSSAFSKPGLPPGGSPQLGCTTSGGLE

SEQ ID NO: 224 - protein, 540 aa, Murine sp.
EEDPCQKSWMAPEALKFSFSTKSDIWSLGCIILDMATCSFLNDTEAMQLRKAIRHHPGSLKPILKTMEEKQIPGTDVYYLLLPFMLHINPSDRLAIKDVMQVTFMSNSFKSSSVALNMQRQKVPIFITDVLLEGNMANILGSWLCASFVNDSRHCDSGIGSQRLGFDFQSVSWTEHPLKDVMQNFSSRPEVQLRAINKLLTMPEDQLGLPWPTELLEEVISIIKQHGRILDILLSTCSLLLRVLGQALAKDPEAEIPRSSLIISFLMDTLRSHPNSERLVNVVYNVLAIISSQGQISEELEEEGLFQLAQENLEHFQEDRDICLSILSLLWSLLVDVVTVDKEPLEQLSGMVTWVLATHPEDVEIAEAGCAVLWLLSLLGCIKESQFEQVVVLLLRSIQLCPGRVLLVNNAFRGLASLAKVSELVAFRIVVLEEGSSGLHLIQDIYKLYKDDPEVVENLCMLLAHLTSYKEILPEMESGGIKDLVQVIRGRFTSSLELISYADEILQVLEANAQPGLQEDQLEPPAGQEAPLQGEPLFRP

SEQ ID NO: 225 - protein, 540 aa, Homo sapiens [sequence omitted]

SEQ ID NO: 226 - protein, 365 aa, Murine sp.
TRPGCAALRNVSGAQYVGSGYTKAVYRVRLPGGAAVALKAVDFSGHDLGSCVREFGARRGCYRLAAHKLLKEMVLLERLRHPNVLQLYGYCYQDSEGIPDTLTTITELGAPVEMIQLLQTSWEDRFRICLSLGRLLHHLAHSPLGSVTLLDFRPRQFVLVNGELKVTDLDDARVEETPCTSSADCTLEFPARNFSLPCSAQGWCEGMNEKRNLYNAYRFFFTYLLPHSAPPSLRPLLDSIVNATGELAWGVDETLAQLETALHLFRSGQYLQNSTSSRAEYQRIPDSAITQEDYRCWPSYHHGGCLLSVFNLAEAIDVCESHAQCRAFVVTNQTTWTGRKLVFFKTGWNQVVPDAGKTTYVKAPG

SEQ ID NO: 227 - protein, 474 aa, Homo sapiens
MISFCPDCGKSIQAAFKFCPYCGNSLPVEEHVGSQTFVNPHVSSFQGSKRGLNSSFETSPKKVKWSSTVTSPRLSLFSDGDSSESEDTLSSSERSKGSGSRPPTPKSSPQKTRKSPQVTRGSPQKTSCSPQKTRQSPQTLKRSRVTTSLEALPTGTVLTDKSGRQWKLKSFQTRDNQGILYEAAPTSTLTCDSGPQKQKFSLKLDAKDGRLFNEQNFFQRAAKPLQVNKWKKLYSTPLLAIPTCMGFGVHQDKYRFLVLPSLGRSLQSALDVSPKHVLSERSVLQVACRLLDALEFLHENEYVHGNVTAENIFVDPEDQSQVTLAGYGFAFRYCPSGKHVAYVEGSRSPHEGDLEFISMDLHKGCGPSRRSDLQSLGYCMLKWLYGFLPWTNCLPNTEDIMKQKQKFVDKPGPFVGPCGHWIRPSETLQKYLKVVMALTYEEKPPYAMLRNNLEALLQDLRVSPYDPIGLPMVP

SEQ ID NO: 228 - protein, 234 aa, Murine sp.
IPTCIGFGIHQDKYRFLVFPSLGRSLQSALDDNPKHVVSERCVLQVACRLLDALEYLHENEYVHGNLTAENVFVNPEDLSQVTLVGYGFTYRYCPGGKHVAYKEGSRSPHDGDLEFISMDLHKGCGPSRRSDLQTLGYCMLKWLYGSLPWTNCLPNTEKITRQKQKYLDSPERLVGLCGRWNKASETLREYLKVVMALNYEEKPPYATLRNSLEALLQDMRVSPYDPLDLQMVP

SEQ ID NO: 229 - protein, 305 aa, Homo sapiens
MGHALCVCSRGTVIIDNKRYLFIQKLGEGGFSYVDLVEGLHDGHFYALKRILCHEQQDREEAQREADMHRLFNHPNILRLVAYCLRERGAKHEAWLLLPFFKRGTLWNEIERLKDKGNFLTEDQILWLLLGICRGLEAIHAKGYAHRDLKPTNILLGDEGQPVLMDLGSMNQACIHVEGSRQALTLQDWAAQRCTISYRAPELFSVQSHCVIDERTDVWSLGCVLYAMMFGEGPYDMVFQKGDSVALAVQNQLSIPQSPRHSSALRQLLNSMMTVDPHQRPHIPLLLSQLEALQPPAPGQHTTQI

SEQ ID NO: 230 - protein, 581 aa, Homo sapiens
MAVRQALGRGLQLGRALLLRFTGKPGRAYGLGRPGPAAGCVRGERPGWAAGPGAEPRRVGLGLPNRLRFFRQSVAGLAARLQRQFVVRAWGCAGPCGRAVFLAFGLGLGLIEEKQAESRRAVSACQEIQAIFTQKSKPGPDPLDTRRLQGFRLEEYLIGQSIGKGCSAAVYEATMPTLPQNLEVTKSTGLLPGRGPGTSAPGEGQERAPGAPAFPLAIKMMWNISAGSSSEAILNTMSQELVPASRVALAGEYGAVTYRKSKRGPKQLAPHPNIIRVLRAFTSSVPLLPGALVDYPDVLPSRLHPEGLGHGRTLFLVMKNYPCTLRQYLCVNTPSPRLAAMMLLQLLEGVDHLVQQGIAHRDLKSDNILVELDPDGCPWLVIADFGCCLADESIGLQLPFSSWYVDRGGNGCLMAPEVSTARPGPRAVIDYSKADAWAVGAIAYEIFGLVNPFYGQGKAHLESRSYQEAQLPALPESVPPDVRQLVRALLQREASKRPSARVAANVLHLSLWGEHILALKNLKLDKMVGWLLQQSAATLLANRLTEKCCVETKMKMLFLANLECETLCQAALLLCSWRAAL

SEQ ID NO: 231 - protein, 698 aa, Homo sapiens
  MOD_RES (507): Variable amino acid
MEKYERIRVVGRGAFGIVHLCLRKADQKLVIIKQIPVEQMTKEERQAAQNECQVLKLLNHPNVIEYYENFLEDKALMIAMEYAPGGTLAEFIQKRCNSLLEEETILHFFVQILLALHHVHTHLILHRDLKTQNILLDKHRMVVKIGDFGISKILSSKSTPCYISPELCEGKPYNQKSDIWALGCVLYELASLKRAFEAANLPALVLKIMSGTFAPISDRYSPELRQLVLSLLSLEPAQRPPLSHIMAQPLCIRALLNLHTDGREVRGPQQHREQDHQCPLQRGIIMTFGSGSNGCLGHGSLTDISQPTIVEALLGYEMVQQVEEALSFTLLGSAPLDQEPLLSIDLGTAHSAAVTGEEDLGSGDVNRLPSWERGHLLAGVASSTDVSTFSEGDCKEPDKCCWRHKQCTGHIIYPFASDCVRHSLHLHSVNHCNCNSRLKDSSEDSSSSRGAGPTCSHVIESPCFELTPEEEHVERFRYGWCKSYRPVSVAVIHHPLYHECGADDLNXKKRKRRRRKSKPPIPTQVGPATASPDLGTSMATGTPDSTAPITIWRSESPTGKGQGSKVIKKVKKKKEKEKDKEEMDEKAKLKKKAKKGQLTKKKSPVKLEPSPPDVSRSLSARQLARMSESSPESREELESEDSYNGRGQGELSSEDIVESSSPRKRENTVQAKKTGAKPSQARKVNKRKSPPGSNPNLS

SEQ ID NO: 232 - protein, 836 aa, Homo sapiens
MSVLGEYERHCDSINSDFGSESGGCGDSSPGPSASQGPRAGGGAAEQEELHYIPIRVLGRGAFGEATLYRRTEDDSLVVWKEVDLTRLSEKERRDALNEIVILALLQHDNIIAYYNHFMDNTTLLIELEYCNGGNLYDKILRQKDKLFEEEMVVWYLFQIVSAVSCIHKAGILHRDIKTLNIFLTKANLIKLGDYGLAKKLNSEYSMAETLVGTPYYMSPELCQGVKYNFKSDIWAVGCVIFELLTLKRTFDATNPLNLCVKIVQGIRAMEVDSSQYSLELIQMVHSCLDQDPEQRPTADELLDRPLLRKRRRSSTVTEAPIAVVTSRTSEVYVWGGGKSTPQKLDVIKSGCSARQVCAGNTHFAVVTVEKELYTWVNMQGGTKLHGQLGHGDKASYRQPKHVEKLQGKAIRQVSCGDDFTVCVTDEGQLYAFGSDYYGCMGVDKVAGPEVLEPMQLNFFLSNPVEQVSCGDNHVVVLTRNKEVYSWGCGEYGRLGLDSEEDYYTPQKVDVPKALIIVAVQCGCDGTFLLTQSGKVLACGLNEFNKLGLNQCMSGIINHEAYHEVPYTTSFTLAKQLSFYKIRTIAPGKTHTAAIDERGRLLTFGCNKCGQLGVGNYKKRLGINLLGGPLGGKQVIRVSCGDEFTIAATDEKVLNSKTIRSNSSGLSIGTVFQSSSPGGGGGGGGGEEEDSQQESETPDPSGGFRGTMEADRGMEGLISPTEAMGNSNGASSSCPGWLRKELENAEFIPMPDSPSPLSAAFSESEKDTLPYEELQGLKVASEAPLEHKPQVEASVTELFAFESQLVTSAESCSNLCWEGNTTDSSCVCVQLSAGGG

SEQ ID NO: 233 - protein, 1011 aa, Homo sapiens
MNLLLSYRDVQDYSAIIELVETLQALPTCDVAEQHNVCFHYTFALNRRNRPGDRAKALSVLLPLVQLEGSVAPDLYCMCGRIYKDMFFSSGFQDAGHREQAYHWYRKAFDVEPSLHSGINAAVLLIAAGQHFEDSKELRLIGMKLGCLLARKGCVEKMQYYWDVGFYLGAQILANDPTQVVLAAEQLYKLNAPIWYLVSVMETFLLYQHFRPTPEPPGGPPRRAHFWLHFLLQSCQPFKTACAQGDQCLVLVLEMNKVLLPAKLEVRGTDPVSTVTLSLLEPETQDIPSSWTFPVASICGVSASKRDERCCFLYALPPAQDVQLCFPSVGHCQWFCGLIQAWVTNPDSTAPAEEAEGAGEMLEFDYEYTETGERLVLGKGTYGVVYAGRDRHTRVRIAIKEIPERDSRFSQPLHEEIALHRRLRHKNIVRYLGSASQGGYLKIFMEEVPGGSLSSLLRSVWGPLKDNESTISFYTRQILQGLGYLHDNHIVHRDIKGDNVLINTFSGLLKISDFGTSKRLAGITPCTETFTGTLQYMAPEIIDQGPRGYGKAADIWSLGCTVIEMATGRPPFHELGSPQAAMFQVGMYKVHPPMPSSLSAEAQAFLLRTFEPDPRLRASAQTLLGDPFLQPGKRSRSPSSPRHAPRPSDAPSASPTPSANSTTQSQTFPCPQAPSQHPPSPPKRCLSYGGTSQLRVPEEPAAEEPASPEESSGLSLLHQESKRRAMLAAVLEQELPALAENLHQEQKQEQGARLGRNHVEELLRCLGAHIHTPNRRQLAQELRALQGRLRAQGLGPALLHRPLFAFPDAVKQILRKRQIRPHWMFVLDSLLSRAVRAALGVLGPEVEKEAVSPRSEELSNEGDSQQSPGQQSPLPVEPEQGPAPLMVQLSLLRAETDRLREILAGKEREYQALVQRALQRLNEEARTYVLAPEPPTALSTDQGLVQWLQELNVDSGTIQMLLNHSFTLHTLLTYATRDDLIYTRIRGGMVCRIWRAILAQRAGSTPVTSGP

SEQ ID NO: 234 - protein, 719 aa, Homo sapiens
MFGKKKKKIEISGPSNFEHRVHTGFDPQEQKFTGLPQQWHSLLADTANRPKPMVDPSCITPIQLAPMKTIVRGNKPCKETSINGLLEDFDNISVTRSNSLRKESPPTPDQGASSHGPGHAEENGFITFSQYSSESDTTADYTTEKYREKSLYGDDLDPYYRGSHAAKQNGHVMKMKHGEAYYSEVKPLKSDFARFSADYHSHLDSLSKPSEYSDLKWEYQRASSSSPLDYSFQFTPSRTAGTSGCSKESLAYSESEWGPSLDDYDRRPKSSYLNQTSPQPTMRQRSRSGSGLQEPMMPFGASAFKTHPQGHSYNSYTYPRLSEPTMCIPKVDYDRAQMVLSPPLSGSDTYPRGPAKLPQSQSKSGYSSSSHQYPSGYHKATLYHHPSLQSSSQYISTASYLSSLSLSSSTYPPPSWGSSSDQQPSRVSHEQFRAALQLVVSPGDPREYLANFIKIGEGSTGIVCIATEKHTGKQVAVKKMDLRKQQRRELLFNEVVIMRDYHHDNVVDMYSSYLVGDELWVVMEFLEGGALTDIVTHTRMNEEQIATVCLSVLRALSYLHNQGVIHRDIKSDSILLTSDGRIKLSDFGFCAQVSKEVPKRKSLVGTPYWMAPEVISRLPYGTEVDIWSLGIMVIEMIDGEPPYFNEPPLQAMRRIRDSLPPRVKDLHKVSSVLRGFLDLMLVREPSQRATAQELLGHPFLKLAGPPSCIVPLMRQYRHH

SEQ ID NO: 235 - protein, 495 aa, Homo sapiens
MNDRNEIQMEAKLQSLTIIAQEILCRFFITLRRHARFLLTKLGRQGMARSGITHSCAVCILCGPSREGDSPVAMGMTRMLLECSLSDKLCVIQEKQYEVIIVPTLLVTIFLILLGVILWLFIREQRTQQQRSGPQGIAPVPPPRDLSWEAGHGGNVALPLKETSVENFLGATTPALAKLQVPREQLSEVLEQICSGSCGPIFRANMNTGDPSKPKSVILKALKEPAGLHEVQDFLGRIQFHQYLGKHKNLVQLEGCCTEKLPLYMVLEDVAQGDLLGFLWTCRRDVMTMDGLLYDLTEKQVYHIGKQVLLALEFLQEKHLFHGDVAARNILMQSDLTAKLCGLGLAYEVYTRGAISSTQTIPLKWLAPERLLLRPASIRADVWSFGILLYEMVTLGAPPYPEVPPTSILEHLQRRKIMKRPSSCTHTMYSIMKSCWRWREADRPSPRELRLRLEAAIKTADDEAVLQVPELVVPELYAAVAGIRVESLFYNYSML

SEQ ID NO: 236 - protein, 183 aa, Murine sp.
LQEKHLFHGDVAARNILIQSDLTPKLCHLGLAYEVHAHGAISSARSSTIPLKWLAPERLLLRPASIRGDIWSFGILLYEMVTLGAPPYPEVPPTSILQYLQRKKIMKRPSSCSHAMYNIMKCCWRWSEDSRPLLVQLLQRLEAASRSADDKAVLQVPELVVPELYADVAGIRAESISYSFSVL

SEQ ID NO: 237 - protein, 367 aa, Homo sapiens
MNSSPAGTPSPQPSRANGNINLGPSANPNAQPTDFDFLKVIGKGNYGKVLLAKRKSDGAFYAVKVLQKKSILKKKEQSHIMAERSVLLKNVRHPFLVGLRYSFQTPEKLYFVLDYVNGGELFFHLQRERRFLEPRARFYAAEVASAIGYLHSLNIIYRDLKPENILLDCQGHVVLTDFGLCKEGVEPEDTTSTFCGTPEYLAPEVLRKEPYDRAVDWWCLGAVLYEMLHGLPPFYSQDVSQMYENILHQPLQIPGGRTVAACDLLQSLLHKDQRQRLGSKADFLEIKNHVFFSPINWDDLYHKRLTPPFNPNVTGPADLKHFDPEFTQEAVSKSIGCTPDTVASSSGASSAFLGFSYAPEDDDILDC

SEQ ID NO: 238 - protein, 452 aa, Homo sapiens [sequence omitted]

SEQ ID NO: 239 - protein, 555 aa, Homo sapiens
MDRSKRNSIAGFPPRVERLEEFEGGGGGEGNVSQVGRVWPSSYRALISAFSRLTRLDDFTCEKIGSGFFSEVFKVRHRASGQVMALKMNTLSSNRANMLKEVQLMNRLSHPNILRYINSGNLEQLLDSNLHLPWTVRVKLAYDIAVGLSYLHFKGIFHRDLTSKNCLIKRDENGYSAVVADFGLAEKIPDVSMGSEKLAVVGSPFWMAPEVLRDEPYNEKADVFSYGIILCEIIARIQADPDYLPRTENFGLDYDAFQHMVGDCPPDFLQLTFNCCNMDPKLRPSFVEIGKTLEEILSRLQEEEQERDRKLQPTARGLLEKAPGVKRLSSLDDKIPHKSPCPRRTIWLSRSQSDIFSRKPPRTVSVLDPYYRPRDGAARTPKVNPFSARQDLMGGKIKFFDLPSKSVISLVFDLDAPGPGTMPLADWQEPLAPPIRRWRSLPGSPEFLHQEACPFVGREESLSDGPPPRLSSLKYRVKEIPPFRASALPAAQAHEAMDCSILQEENGFGSRPQGTSPCPAGASEEMEVEERPAGSTPATFSTSGIGLQTQGKQDG

SEQ ID NO: 240-242 - skipped (3 entries)

SEQ ID NO: 243 - DNA, 23 bp, Artificial Sequence
  Description of Artificial Sequence: Primer
  modified_base (9): a, c, g or t
gagatcgrnttyaargarttyga

SEQ ID NO: 244 - DNA, 24 bp, Artificial Sequence
  Description of Artificial Sequence: Primer
gctgctggacagtgacttgtattt

SEQ ID NO: 245 - DNA, 19 bp, Artificial Sequence
  Description of Artificial Sequence: Primer
ctctcacctcaggaactgg

SEQ ID NO: 246 - DNA, 22 bp, Artificial Sequence
  Description of Artificial Sequence: Primer
gacatcctgccggccaactacg

SEQ ID NO: 247 - DNA, 20 bp, Artificial Sequence
  Description of Artificial Sequence: Primer
tgcgcgacaccattgaccag

SEQ ID NO: 248 - DNA, 24 bp, Artificial Sequence
  Description of Artificial Sequence: Primer
aaaggagaactacattttgaaaat

SEQ ID NO: 249 - DNA, 24 bp, Artificial Sequence
  Description of Artificial Sequence: Primer
caaattaagatcattgactttggg

SEQ ID NO: 250 - DNA, 19 bp, Artificial Sequence
  Description of Artificial Sequence: Primer
gtggacatctggtccctcg

SEQ ID NO: 251 - DNA, 24 bp, Artificial Sequence
  Description of Artificial Sequence: Primer
  modified_base (7): a, c, g or t
  modified_base (10): a, c, g or t
  modified_base (13): a, c, g or t
  modified_base (19): a, c, g or t
tgtcacnccnagnswccanayrtt

SEQ ID NO: 252 - DNA, 22 bp, Artificial Sequence
  Description of Artificial Sequence: Primer
gaaagcaaagccttcacacctt

SEQ ID NO: 253 - DNA, 17 bp, Artificial Sequence
  Description of Artificial Sequence: Primer
gcttgcggatcttctca

SEQ ID NO: 254 - DNA, 22 bp, Artificial Sequence
  Description of Artificial Sequence: Primer
cggccctggagctgcatcacta

SEQ ID NO: 255 - DNA, 20 bp, Artificial Sequence
  Description of Artificial Sequence: Primer
ctcagggcttacatacagag

SEQ ID NO: 256 - DNA, 27 bp, Artificial Sequence
  Description of Artificial Sequence: Primer
cttcatcatctctaatacattggttgg

SEQ ID NO: 257 - DNA, 21 bp, Artificial Sequence
  Description of Artificial Sequence: Primer
ggaaacaaagtccttggcctc

SEQ ID NO: 258 - DNA, 21 bp, Artificial Sequence
  Description of Artificial Sequence: Primer
gtaggtccttcactcttggag

SEQ ID NO: 259 - protein, 37 aa, Homo sapiens [sequence omitted]

SEQ ID NO: 260 - DNA, 20 bp, Artificial Sequence
  Description of Artificial Sequence: Primer
ctcctcaacagacagtgcag

SEQ ID NO: 261 - DNA, 21 bp, Artificial Sequence
  Description of Artificial Sequence: Primer
gacattctactactcggtctc

SEQ ID NO: 262 - protein, 55 aa, Homo sapiens
LPLAARMSEESYFESKTEESNSAEMSCQITATSNGEGHGMNPSLQAMMLMGFGDI

SEQ ID NO: 263 - protein, 25 aa, Homo sapiens
FSMNKAGAVMHSGMQINMQAKQNSS

SEQ ID NO: 264 - protein, 44 aa, Homo sapiens
KTTSKRRGKKVNMALGFSDFDLSEGDDDDDDDGEEEDNDMDNSE

SEQ ID NO: 265 - DNA, 57 bp, Artificial Sequence
  Description of Artificial Sequence: Primer
  modified_base (57): a, g, c or t
aagcagtggtaacaacgcagagtacttttttttttttttttttttttttttttttvn

SEQ ID NO: 266 - DNA, 30 bp, Artificial Sequence
  Description of Artificial Sequence: Primer
aagcagtggtaacaacgcagagtacgcggg

SEQ ID NO: 267 - DNA, 30 bp, Artificial Sequence
  Description of Artificial Sequence: Primer
aagtggcaacagagataacgcgtacgcggg

SEQ ID NO: 268 - DNA, 23 bp, Artificial Sequence
  Description of Artificial Sequence: Primer
aagcagtggtaacaacgcagagt

SEQ ID NO: 269 - DNA, 23 bp, Artificial Sequence
  Description of Artificial Sequence: Primer
aagtggcaacagagataacgcgt

1-25. (canceled)

26. An antibody or antibody fragment having specific binding affinity to a kinase polypeptide selected from the group consisting of SEQ ID NO:122, SEQ ID NO:123, SEQ ID NO:124, SEQ ID NO:125, SEQ ID NO:126, SEQ ID NO:127, SEQ ID NO:128, SEQ ID NO:129, SEQ ID NO:130, SEQ ID NO:131, SEQ ID NO:132, SEQ ID NO:133, SEQ ID NO:134, SEQ ID NO:135, SEQ ID NO:136, SEQ ID NO:137, SEQ ID NO:138, SEQ ID NO:139, SEQ ID NO:140, SEQ ID NO:141, SEQ ID NO:142, SEQ ID NO:143, SEQ ID NO:144, SEQ ID NO:145, SEQ ID NO:146, SEQ ID NO:147, SEQ ID NO:148, SEQ ID NO:149, SEQ ID NO:150, SEQ ID NO:151, SEQ ID NO:152, SEQ ID NO:153, SEQ ID NO:154, SEQ ID NO:155, SEQ ID NO:156, SEQ ID NO:157, SEQ ID NO:158, SEQ ID NO:159, SEQ ID NO:160, SEQ ID NO:161, SEQ ID NO:162, SEQ ID NO:163, SEQ ID NO:164, SEQ ID NO:165, SEQ ID NO:166, SEQ ID NO:167, SEQ ID NO:168, SEQ ID NO:169, SEQ ID NO:170, SEQ ID NO:171, SEQ ID NO:172, SEQ ID NO:173, SEQ ID NO:174, SEQ ID NO:175, SEQ ID NO:176, SEQ ID NO:177, SEQ ID NO:178, SEQ ID NO:179, SEQ ID NO:180, SEQ ID NO:181, SEQ ID NO:182, SEQ ID NO:183, SEQ ID NO:184, SEQ ID NO:185, SEQ ID NO:186, SEQ ID NO:187, SEQ ID NO:189, SEQ ID NO:190, SEQ ID NO:191, SEQ ID NO:192, SEQ ID NO:193, SEQ ID NO:194, SEQ ID NO:195, SEQ ID NO:196, SEQ ID NO:197, SEQ ID NO:198, SEQ ID NO:199, SEQ ID NO:200, SEQ ID NO:201, SEQ ID NO:202, SEQ ID NO:203, SEQ ID NO:204, SEQ ID NO:205, SEQ ID NO:206, SEQ ID NO:207, SEQ ID NO:208, SEQ ID NO:209, SEQ ID NO:210, SEQ ID NO:211, SEQ ID NO:212, SEQ ID NO:213, SEQ ID NO:214, SEQ ID NO:215, SEQ ID NO:216, SEQ ID NO:217, SEQ ID NO:218, SEQ ID NO:219, SEQ ID NO:220, SEQ ID NO:221, SEQ ID NO:222, SEQ ID NO:223, SEQ ID NO:224, SEQ ID NO:225, SEQ ID NO:226, SEQ ID NO:227, SEQ ID NO:228, SEQ ID NO:229, SEQ ID NO:230, SEQ ID NO:231, SEQ ID NO:232, SEQ ID NO:233, SEQ ID NO:234, SEQ ID NO:235, SEQ ID NO:236, SEQ ID NO:237, SEQ ID NO:238, SEQ ID NO:239, SEQ ID NO:240, SEQ ID NO:241, and SEQ ID NO:242.

27. The antibody or antibody fragment of claim 26, wherein said polypeptide comprises:
(a) an amino acid sequence selected from the group consisting of SEQ ID NO:122, SEQ ID NO:123, SEQ ID NO:124, SEQ ID NO:125, SEQ ID NO:126, SEQ ID NO:127, SEQ ID NO:128, SEQ ID NO:129, SEQ ID NO:130, SEQ ID NO:131, SEQ ID NO:132, SEQ ID NO:133, SEQ ID NO:134, SEQ ID NO:135, SEQ ID NO:136, SEQ ID NO:137, SEQ ID NO:138, SEQ ID NO:139, SEQ ID NO:140, SEQ ID NO:141, SEQ ID NO:142, SEQ ID NO:143, SEQ ID NO:144, SEQ ID NO:145, SEQ ID NO:146, SEQ ID NO:147, SEQ ID NO:148, SEQ ID NO:149, SEQ ID NO:150, SEQ ID NO:151, SEQ ID NO:152, SEQ ID NO:153, SEQ ID NO:154, SEQ ID NO:155, SEQ ID NO:156, SEQ ID NO:157, SEQ ID NO:158, SEQ ID NO:159, SEQ ID NO:160, SEQ ID NO:161, SEQ ID NO:162, SEQ ID NO:163, SEQ ID NO:164, SEQ ID NO:165, SEQ ID NO:166, SEQ ID NO:167, SEQ ID NO:168, SEQ ID NO:169, SEQ ID NO:170, SEQ ID NO:171, SEQ ID NO:172, SEQ ID NO:173, SEQ ID NO:174, SEQ ID NO:175, SEQ ID NO:176, SEQ ID NO:177, SEQ ID NO:178, SEQ ID NO:179, SEQ ID NO:180, SEQ ID NO:181, SEQ ID NO:182, SEQ ID NO:183, SEQ ID NO:184, SEQ ID NO:185, SEQ ID NO:186, SEQ ID NO:187, SEQ ID NO:189, SEQ ID NO:190, SEQ ID NO:191, SEQ ID NO:192, SEQ ID NO:193, SEQ ID NO:194, SEQ ID NO:195, SEQ ID NO:196, SEQ ID NO:197, SEQ ID NO:198, SEQ ID NO:199, SEQ ID NO:200, SEQ ID NO:201, SEQ ID NO:202, SEQ ID NO:203, SEQ ID NO:204, SEQ ID NO:205, SEQ ID NO:206, SEQ ID NO:207, SEQ ID NO:208, SEQ ID NO:209, SEQ ID NO:210, SEQ ID NO:211, SEQ ID NO:212, SEQ ID NO:213, SEQ ID NO:214, SEQ ID NO:215, SEQ ID NO:216, SEQ ID NO:217, SEQ ID NO:218, SEQ ID NO:219, SEQ ID NO:220, SEQ ID NO:221, SEQ ID NO:222, SEQ ID NO:223, SEQ ID NO:224, SEQ ID NO:225, SEQ ID NO:226, SEQ ID NO:227, SEQ ID NO:228, SEQ ID NO:229, SEQ ID NO:230, SEQ ID NO:231, SEQ ID NO:232, SEQ ID NO:233, SEQ ID NO:234, SEQ ID NO:235, SEQ ID NO:236, SEQ ID NO:237, SEQ ID NO:238, SEQ ID NO:239, SEQ ID NO:240, SEQ ID NO:241, and SEQ ID NO:242;
(b) an amino acid sequence selected from the group consisting of SEQ ID NO:122, SEQ ID NO:123, SEQ ID NO:124, SEQ ID NO:125, SEQ ID NO:126, SEQ ID NO:127, SEQ ID NO:128, SEQ ID NO:129, SEQ ID NO:130, SEQ ID NO:131, SEQ ID NO:132, SEQ ID NO:133, SEQ ID NO:134, SEQ ID NO:135, SEQ ID NO:136, SEQ ID NO:137, SEQ ID NO:138, SEQ ID NO:139, SEQ ID NO:140, SEQ ID NO:141, SEQ ID NO:142, SEQ ID NO:143, SEQ ID NO:144, SEQ ID NO:145, SEQ ID NO:146, SEQ ID NO:147, SEQ ID NO:148, SEQ ID NO:149, SEQ ID NO:150, SEQ ID NO:151, SEQ ID NO:152, SEQ ID NO:153, SEQ ID NO:154, SEQ ID NO:155, SEQ ID NO:156, SEQ ID NO:157, SEQ ID NO:158, SEQ ID NO:159, SEQ ID NO:160, SEQ ID NO:161, SEQ ID NO:162, SEQ ID NO:163, SEQ ID NO:164, SEQ ID NO:165, SEQ ID NO:166, SEQ ID NO:167, SEQ ID NO:168, SEQ ID NO:169, SEQ ID NO:170, SEQ ID NO:171, SEQ ID NO:172, SEQ ID NO:173, SEQ ID NO:174, SEQ ID NO:175, SEQ ID NO:176, SEQ ID NO:177, SEQ ID NO:178, SEQ ID NO:179, SEQ ID NO:180, SEQ ID NO:181, SEQ ID NO:182, SEQ ID NO:183, SEQ ID NO:184, SEQ ID NO:185, SEQ ID NO:186, SEQ ID NO:187, SEQ ID NO:189, SEQ ID NO:190, SEQ ID NO:191, SEQ ID NO:192, SEQ ID NO:193, SEQ ID NO:194, SEQ ID NO:195, SEQ ID NO:196, SEQ ID NO:197, SEQ ID NO:198, SEQ ID NO:199, SEQ ID NO:200, SEQ ID NO:201, SEQ ID NO:202, SEQ ID NO:203, SEQ ID NO:204, SEQ ID NO:205, SEQ ID NO:206, SEQ ID NO:207, SEQ ID NO:208, SEQ ID NO:209, SEQ ID NO:210, SEQ ID NO:211, SEQ ID NO:212, SEQ ID NO:213, SEQ ID NO:214, SEQ ID NO:215, SEQ ID NO:216, SEQ ID NO:217, SEQ ID NO:218, SEQ ID NO:219, SEQ ID NO:220, SEQ ID NO:221, SEQ ID NO:222, SEQ ID NO:223, SEQ ID NO:224, SEQ ID NO:225, SEQ ID NO:226, SEQ ID NO:227, SEQ ID NO:228, SEQ ID NO:229, SEQ ID NO:230, SEQ ID NO:231, SEQ ID NO:232, SEQ ID NO:233, SEQ ID NO:234, SEQ ID NO:235, SEQ ID NO:236, SEQ ID NO:237, SEQ ID NO:238, SEQ ID NO:239, SEQ ID NO:240, SEQ ID NO:241, and SEQ ID NO:242, except that it lacks one or more, but not all, of the domains selected from the group consisting of a C-terminal domain, a catalytic domain, an N-terminal domain, a spacer region, a praline-rich region, a coiled-coil structure region, and a C-terminal tail.
(c) a domain of an amino acid sequence selected from the group set forth in SEQ ID NO:122, SEQ ID NO:123, SEQ ID NO:124, SEQ ID NO:125, SEQ ID NO:126, SEQ ID NO:127, SEQ ID NO:128, SEQ ID NO:129, SEQ ID NO:130, SEQ ID NO:131, SEQ ID NO:132, SEQ ID NO:133, SEQ ID NO:134, SEQ ID NO:135, SEQ ID NO:136, SEQ ID NO:137, SEQ ID NO:138, SEQ ID NO:139, SEQ ID NO:140, SEQ ID NO:141, SEQ ID NO:142, SEQ ID NO:143, SEQ ID NO:144, SEQ ID NO:145, SEQ ID NO:146, SEQ ID NO:147, SEQ ID NO:148, SEQ ID NO:149, SEQ ID NO:150, SEQ ID NO:151, SEQ ID NO:152, SEQ ID NO:153, SEQ ID NO:154, SEQ ID NO:155, SEQ ID NO:156, SEQ ID NO:157, SEQ ID NO:158, SEQ ID NO:159, SEQ ID NO:160, SEQ ID NO:161, SEQ ID NO:162, SEQ ID NO:163, SEQ ID NO:164, SEQ ID NO:165, SEQ ID NO:166, SEQ ID NO:167, SEQ ID NO:168, SEQ ID NO:169, SEQ ID NO:170, SEQ ID NO:171, SEQ ID NO:172, SEQ ID NO:173, SEQ ID NO:174, SEQ ID NO:175, SEQ ID NO:176, SEQ ID NO:177, SEQ ID NO:178, SEQ ID NO:179, SEQ ID NO:180, SEQ ID NO:181, SEQ ID NO:182, SEQ ID NO:183, SEQ ID NO:184, SEQ ID NO:185, SEQ ID NO:186, SEQ ID NO:187, SEQ ID NO:189, SEQ ID NO:190, SEQ ID NO:191, SEQ ID NO:192, SEQ ID NO:193, SEQ ID NO:194, SEQ ID NO:195, SEQ ID NO:196, SEQ ID NO:197, SEQ ID NO:198, SEQ ID NO:199, SEQ ID NO:200, SEQ ID NO:201, SEQ ID NO:202, SEQ ID NO:203, SEQ ID NO:204, SEQ ID NO:205, SEQ ID NO:206, SEQ ID NO:207, SEQ ID NO:208, SEQ ID NO:209, SEQ ID NO:210, SEQ ID NO:211, SEQ ID NO:212, SEQ ID NO:213, SEQ ID NO:214, SEQ ID NO:215, SEQ ID NO:216, SEQ ID NO:217, SEQ ID NO:218, SEQ ID NO:219, SEQ ID NO:220, SEQ ID NO:221, SEQ ID NO:222, SEQ ID NO:223, SEQ ID NO:224, SEQ ID NO:225, SEQ ID NO:226, SEQ ID NO:227, SEQ ID NO:228, SEQ ID NO:229, SEQ ID NO:230, SEQ ID NO:231, SEQ ID NO:232, SEQ ID NO:233, SEQ ID NO:234, SEQ ID NO:235, SEQ ID NO:236, SEQ ID NO:237, SEQ ID NO:238, SEQ ID NO:239, SEQ ID NO:240, SEQ ID NO:241, and SEQ ID NO:242 wherein said domain is selected from the group consisting of a C-terminal domain, a catalytic domain, an N-terminal domain, a spacer region, a praline-rich region, a coiled-coil structure region, and a C-terminal tail.

28. A hybridoma which produces an antibody having specific binding affinity to a kinase polypeptide selected from the group consisting of SEQ ID NO:122, SEQ ID NO:123, SEQ ID NO:124, SEQ ID NO:125, SEQ ID NO:126, SEQ ID NO:127, SEQ ID NO:128, SEQ ID NO:129, SEQ ID NO:130, SEQ ID NO:131, SEQ ID NO:132, SEQ ID NO:133, SEQ ID NO:134, SEQ ID NO:135, SEQ ID NO:136, SEQ ID NO:137, SEQ ID NO:138, SEQ ID NO:139, SEQ ID NO:140, SEQ ID NO:141, SEQ ID NO:142, SEQ ID NO:143, SEQ ID NO:144, SEQ ID NO:145, SEQ ID NO:146, SEQ ID NO:147, SEQ ID NO:148, SEQ ID NO:149, SEQ ID NO:150, SEQ ID NO:151, SEQ ID NO:152, SEQ ID NO:153, SEQ ID NO:154, SEQ ID NO:155, SEQ ID NO:156, SEQ ID NO:157, SEQ ID NO:158, SEQ ID NO:159, SEQ ID NO:160, SEQ ID NO:161, SEQ ID NO:162, SEQ ID NO:163, SEQ ID NO:164, SEQ ID NO:165, SEQ ID NO:166, SEQ ID NO:167, SEQ ID NO:168, SEQ ID NO:169, SEQ ID NO:170, SEQ ID NO:171, SEQ ID NO:172, SEQ ID NO:173, SEQ ID NO:174, SEQ ID NO:175, SEQ ID NO:176, SEQ ID NO:177, SEQ ID NO:178, SEQ ID NO:179, SEQ ID NO:180, SEQ ID NO:181, SEQ ID NO:182, SEQ ID NO:183, SEQ ID NO:184, SEQ ID NO:185, SEQ ID NO:186, SEQ ID NO:187, SEQ ID NO:189, SEQ ID NO:190, SEQ ID NO:191, SEQ ID NO:192, SEQ ID NO:193, SEQ ID NO:194, SEQ ID NO:195, SEQ ID NO:196, SEQ ID NO:197, SEQ ID NO:198, SEQ ID NO:199, SEQ ID NO:200, SEQ ID NO:201, SEQ ID NO:202, SEQ ID NO:203, SEQ ID NO:204, SEQ ID NO:205, SEQ ID NO:206, SEQ ID NO:207, SEQ ID NO:208, SEQ ID NO:209, SEQ ID NO:210, SEQ ID NO:211, SEQ ID NO:212, SEQ ID NO:213, SEQ ID NO:214, SEQ ID NO:215, SEQ ID NO:216, SEQ ID NO:217, SEQ ID NO:218, SEQ ID NO:219, SEQ ID NO:220, SEQ ID NO:221, SEQ ID NO:222, SEQ ID NO:223, SEQ ID NO:224, SEQ ID NO:225, SEQ ID NO:226, SEQ ID NO:227, SEQ ID NO:228, SEQ ID NO:229, SEQ ID NO:230, SEQ ID NO:231, SEQ ID NO:232, SEQ ID NO:233, SEQ ID NO:234, SEQ ID NO:235, SEQ ID NO:236, SEQ ID NO:237, SEQ ID NO:238, SEQ ID NO:239, SEQ ID NO:240, SEQ ID NO:241, and SEQ ID NO:242.

29-38. (canceled)
